(19) United States
(12) Patent Application Publication
(10) Pub. No.: US 2004/0219521 A1
(43) Pub. Date: Nov. 4, 2004

(54) Novel nucleic acids and polypeptides

(76) Inventors: Y. Tom Tang, San Jose, CA (US); Zhiwei Wang, Sunnyvale, CA (US); Gezhi Weng, Piedmont, CA (US); Bryan J. Boyle, San Francisco, CA (US); Radoje T. Drmanac, Palo Alto, CA (US)

Correspondence Address: Luisa Bigornia, HYSEQ, INC., 670 Almanor Avenue, Sunnyvale, CA, 94085, US

(21) Appl. No.: 10/128,558

(22) Filed: Apr. 22, 2002

Related U.S. Application Data
(63) Continuation-in-part of application No. PCT/US00/35017, filed on Dec. 22, 2000.
Application No. PCT/US00/35017 is a continuation-in-part of application No. 09/552,317, filed on Apr. 25, 2000, now abandoned.
Application No. 09/552,317 is a continuation-in-part of application No. 09/488,725, filed on Jan. 21, 2000.
Application No. 09/552,317 is a continuation-in-part of application No. PCT/US01/02623, filed on Jan. 25, 2001.
Application No. PCT/US01/02623 is a continuation-in-part of application No. 09/491,404, filed on Jan. 25, 2000, now abandoned.
(60) Provisional application No. 60/339,453, filed on Dec. 11, 2001.

(30) Foreign Application Priority Data
Dec. 22, 2000 (WO) PCT/US00//35017
Jan. 25, 2001 (WO) PCT/US01/02623
Feb. 5, 2001 (WO) PCT/US01/03800
Feb. 26, 2001 (WO) PCT/US01/04927
Mar. 5, 2001 (WO) PCT/US01/04941
Mar. 30, 2001 (WO) PCT/US01/08631
Apr. 18, 2001 (WO) PCT/US01/08656

(51) Int. Cl. C12Q 1/68; C07H 21/04; C12N 9/00

(52) U.S. Cl. 435/6; 435/69.1; 435/320.1; 435/325; 435/183; 536/23.2

(57) ABSTRACT

The present invention provides novel nucleic acids, novel polypeptide sequences encoded by these nucleic acids and uses thereof.

### 1. CROSS REFERENCE TO RELATED APPLICATIONS

[0001] This application is a continuation-in-part application of PCT Application Serial No. PCT/US00/35017 filed Dec. 22, 2000 entitled “Novel Contigs Obtained from Various Libraries”, Attorney Docket No. 784CIP3A/PCT, which in turn is a continiuation-in-part application of U.S. application Ser. No. 09/552,317 filed Apr. 25, 2000 entitled “Novel Contigs Obtained from Various Libraries”, Attorney Docket No. 784CIP, which in turn is a continuation-in-part application of U.S. application Ser. No. 09/488,725 filed Jan. 21, 2000 entitled “Novel Contigs Obtained from Various Libraries”, Attorney Docket No. 784; PCT Application Serial No. PCT/US01/02623 filed Jan. 25, 2001 entitled “Novel Contigs Obtained from Various Libraries”, Attorney Docket No. 785CIP3/PCT, which in turn is a continuation-in-part application of U.S. application Ser. No. 09/491,404 filed Jan. 25, 2000 entitled “Novel Contigs Obtained from Various Libraries”, Attorney Docket No. 785; PCT application Ser. No. PCT/US01/03800 filed Feb. 5, 2001 entitled “Novel Contigs Obtained from Various Libraries”, Attorney Docket No. 787CIP3/PCT, which in turn is a continuation-in-part application of U.S. application Ser. No. 09/560,875 filed Apr. 27, 2000 entitled “Novel Contigs Obtained from Various Libraries”, Attorney Docket No. 787CIP, which in turn is a continuation-in-part application of U.S. application Ser. No. 09/496,914 filed Feb. 03, 2000 entitled “Novel Contigs Obtained from Various Libraries”, Attorney Docket No. 787; PCT Application Serial No. PCT/US01/04927 filed Feb. 26, 2001 entitled “Novel Contigs Obtained from Various Libraries”, Attorney Docket No. 788CIP3/PCT, which in turn is a continuation-in-part application of U.S. application Ser. No. 09/577,409 filed May 18, 2000 entitled “Novel Contigs Obtained from Various Libraries”, Attorney Docket No. 788CIP, which in turn is a continuation-in-part application of U.S. application Ser. No. 09/515,126 filed Feb. 28, 2000 entitled “Novel Contigs Obtained from Various Libraries”, Attorney Docket No. 788; PCT Application Serial No. PCT/US01/04941 filed March 5, 2001 entitled “Novel Contigs Obtained from Various Libraries”, Attorney Docket No. 789CIP3/PCT, which in turn is a continuation-in-part application of U.S. application Ser. No. 09/574,454 filed May 19, 2000 entitled “Novel Contigs Obtained from Various Libraries”, Attorney Docket No. 789CIP, which in turn is a continuation-in-part application of U.S. application Ser. No. 09/519,705 filed Mar. 07, 2000 entitled “Novel Contigs Obtained from Various Libraries”, Attorney Docket No. 789; PCT Application Serial No. PCT/US01/08631 filed Mar. 30, 2001 entitled “Novel Contigs Obtained from Various Libraries”, Attorney Docket No. 790C1P3/PCT, which in turn is a continuation-in-part application of U.S. application Ser. No. 09/649,167 filed Aug. 23, 2000 entitled “Novel Contigs Obtained from Various Libraries”, Attorney Docket No. 790CIP, which in turn is a continuation-in-part application of U.S. application Ser. No. 09/540,217 filed Mar. 31, 2000 entitled “Novel Contigs Obtained from Various Libraries”, Attorney Docket No. 790; and PCT Application Serial No. PCT/US01/08656 filed Apr. 18, 2001 entitled “Novel Contigs Obtained from Various Libraries”, Attorney Docket No. 791CIP3/PCT, which in turn is a continuation-in-part application of U.S. application Ser. No. 09/770,160 filed Jan. 26, 2001 entitled “Novel Contigs Obtained from Various Libraries”, Attorney Docket No. 791 CIP, which is in turn a continuation-in-part application of U.S. application Ser. No. 09/552,929 filed Apr. 18, 2000 entitled “Novel Contigs Obtained from Various Libraries”, Attorney Docket No. 791; all of which are incorporated herein by reference in their entirety.

### 2. BACKGROUND OF THE INVENTION

[0002] 2.1 Technical Field

[0003] The present invention provides novel polynucleotides and proteins encoded by such polynucleotides, along with uses for these polynucleotides and proteins, for example in therapeutic, diagnostic and research methods.

[0004] 2.2 Background

[0005] Technology aimed at the discovery of protein factors (including e.g., cytokines, such as lmphokines, interferons, circulating soluble factors, chemokines, and interleukins) has matured rapidly over the past decade. The now routine hybridization cloning and expression cloning techniques clone novel polynucleotides “directly” in the sense that they rely on information directly related to the discovered protein (i.e., partial DNA/amino acid sequence of the protein in the case of hybridization cloning; activity of the protein in the case of expression cloning). More recent “indirect” cloning techniques such as signal sequence cloning, which isolates DNA sequences based on the presence of a now well-recognized secretory leader sequence motif, as well as various PCR-based or low stringency hybridization-based cloning techniques, have advanced the state of the art by maling available large numbers of DNA/amino acid sequences for proteins that are known to have biological activity, for example, by virtue of their secreted nature in the case of leader sequence cloning, by virtue of their cell or tissue source in the case of PCR-based techniques, or by virtue of structural similarity to other genes of known biological activity.

[0006] Identified polynucleotide and polypeptide sequences have numerous applications in, for example, diagnostics, forensics, gene mapping; identification of mutations responsible for genetic disorders or other traits, to assess biodiversity, and to produce many other types of data and products dependent on DNA and amino acid sequences.

### 3. SUMMARY OF THE INVENTION

[0007] The compositions of the present invention include novel isolated polypeptides, novel isolated polynucleotides encoding such polypeptides, including recombinant DNA molecules, cloned genes or degenerate variants thereof, especially naturally occurring variants such as allelic variants, antisense polynucleotide molecules, and antibodies that specifically recognize one or more epitopes present on such polypeptides, as well as hybridomas producing such antibodies.

[0008] The compositions of the present invention additionally include vectors, including expression vectors, containing the polynucleotides of the invention, cells genetically engineered to contain such polynucleotides, and cells genetically engineered to express such polynucleotides.

[0009] The present invention relates to a collection or library of at least one novel nucleic acid sequence assembled from expressed sequence tags (ESTs) isolated mainly by sequencing by hybridization (SBH), and in some cases, sequences obtained from one or more public databases. The invention relates also to the proteins encoded by such polynucleotides, along with therapeutic, diagnostic and research utilities for these polynucleotides and proteins. These nucleic acid sequences are designated as SEQ ID NO: 1-124, or 249-330 and are provided in the Sequence Listing. In the nucleic acids provided in the Sequence Listing, A is adenine; C is cytosine; G is guanine; T is thymine; and N is any of the four bases or unlcnown. In the amino acids provided in the Sequence Listing,* corresponds to the stop codon.

[0010] The nucleic acid sequences of the present invention also include, nucleic acid sequences that hybridize to the complement of SEQ ID NO: 1-124, or 249-330 under stringent hybridization conditions; nucleic acid sequences which are allelic variants or species homologues of any of the nucleic acid sequences recited above, or nucleic acid sequences that encode a peptide comprising a specific domain or truncation of the peptides encoded by SEQ ID NO: 1-124, or 249-330. A polynucleotide comprising a nucleotide sequence having at least 90% identity to an identifying sequence of SEQ ID NO: 1-124, or 249-330 or a degenerate variant or fragment thereof. The identifying sequence can be 100 base pairs in length.

[0011] The nucleic acid sequences of the present invention also include the sequence information from the nucleic acid sequences of SEQ ID NO: 1-124, or 249-330. The sequence information can be a segment of any one of SEQ ID NO: 1-124, or 249-330 that uniquely identifies or represents the sequence information of SEQ ID NO: 1 -124, or 249-330.

[0012] A collection as used in this application can be a collection of only one polynucleotide. The collection of sequence infonnation or identifiing information of each sequence can be provided on a nucleic acid array. In one embodiment, segments of sequence information are provided on a nucleic acid array to detect the polynucleotide that contains the segment. The array can be designed to detect full-match or mismatch to the polynucleotide that contains the segment. The collection can also be provided in a computer-readable format.

[0013] This invention also includes the reverse or direct complement of any of the nucleic acid sequences recited above; cloning or expression vectors containing the nucleic acid sequences; and host cells or organisms transformed with these expression vectors. Nucleic acid sequences (or their reverse or direct complements) according to the invention have numerous applications in a variety of techniques known to those skilled in the art of molecular biology, such as use as hybridization probes, use as primers for PCR, use in an array, use in computer-readable media, use in sequencing full-length genes, use for chromosome and gene mapping, use in the recombinant production of protein, and use in the generation of anti-sense DNA or RNA, their chemical analogs and the like.

[0014] In a preferred embodiment, the nucleic acid sequences of SEQ ID NO: 1-124, or 249-330 or novel segments or parts of the nucleic acids of the invention are used as primers in expression assays that are well known in the art. In a particularly preferred embodiment, the nucleic acid sequences of SEQ ID NO: 1-124, or 249-330 or novel segments or parts of the nucleic acids provided herein are used in diagnostics for identifying expressed genes or, as well known in the airt and exemplified byVollrath et al., Science 258:52-59 (1992), as expressed sequence tags for physical mapping of the human genome.

[0015] The isolated polynucleotides of the invention include, but are not limited to, a polynucleotide comprising any one of the nucleotide sequences set foith in SEQ ID NO: 1-124, or 249-330; a polynucleotide comprising any of the full length protein coding sequences of SEQ ID NO: 1-124, or 249-330; and a polynucleotide comprising any of the nucleotide sequences of the mature protein coding sequences of SEQ ID NO: 1-124, or 249-330. The polynucleotides of the present invention also include, but are not limited to, a polynucleotide that hybridizes under stringent hybridization conditions to (a) the complement of any one of the nucleotide sequences set forth in SEQ ID NO: 1-124, or 249-330; (b) a nucleotide sequence encoding any one of the amino acid sequences set forth in SEQ ID NO: 1-124, or 249-330; (c) a polynucleotide which is an allelic variant of any polynucleotides recited above; (d) a polynucleotide which encodes a species homolog (e.g. ortlhologs) of any of the proteins recited above; or (e) a polynucleotide that encodes a polypeptide comprising a specific domain or truncation of any of the polypeptides comprising an amino acid sequence set forth in SEQ ID NO: 125-248, or 331-412, or Tables 3, 5, 6, or 8.

[0016] The isolated polypeptides of the invention include, but are not limited to, a polypeptide comprising any of the amino acid sequences set forth in the Sequence Listing; or the corresponding full length or mature protein. Polypeptides of the invention also include polypeptides with biological activity that are encoded by (a) any of the polynucleotides having a nucleotide sequence set forth in SEQ ID NO: 1-124, or 249-330; or (b) polynucleotides that hybridize to the complement of the polynucleotides of (a) under stringent hybridization conditions. Biologically active variants of any of the polypeptide sequences in the Sequence Listing, and “substantial equivalents” thereof (e.g., with at least about 65%, 70%, 75%, 80%, 85%, 90%, 95%, 98% or 99% amino acid sequence identity) that preferably retain biological activity are also contemplated. The polypeptides of the invention may be wholly or partially chemically synthesized but are preferably produced by recombinant means using the genetically engineered cells (e.g. host cells) of the invention.

[0017] The invention also provides compositions comprising a polypeptide of the invention. Polypeptide compositions of the invention may further comprise an acceptable carrier, such as a hydrophilic, e.g., pharmaceutically acceptable, carrier.

[0018] The invention also provides host cells transformed or transfected with a polynucleotide of the invention.

[0019] The invention also relates to methods for producing a polypeptide of the invention comprising growing a culture of the host cells of the invention in a suitable culture medium under conditions permitting expression of the desired polypeptide, and purifying the polypeptide from the culture or from the host cells. Preferred embodiments include those in which the protein produced by such processes is a mature form of the protein.

[0020] Polynucleotides according to the invention have numerous applications in a variety of techniques known to those skilled in the art of molecular biology. These techniques include use as hybridization probes, use as oligomers, or primers, for PCR, use for chiromosome and gene mapping, use in the recombinant production of protein, and use in generation of anti-sense DNA or RNA, their chemical analogs and the like. For example, when the expression of an mRNA is largely restricted to a particular cell or tissue type, polynucleotides of the invention can be used as hybridization probes to detect the presence of the particular cell or tissue MRNA in a sample using, e.g., in situ hybridization.

[0021] In other exemplary embodiments, the polynucleotides are used in diagnostics as expressed sequence tags for identifying expressed genes or, as well known in the art and exemplified by Vollrath et al., Science 258:52-59 (1992), as expressed sequence tags for physical mapping of the human genome.

[0022] The polypeptides according to the invention can be used in a variety of conventional procedures and methods that are currently applied to other proteins. For example, a polypeptide of the invention can be used to generate an antibody that specifically binds the polypeptide. Such antibodies, particularly monoclonal antibodies, are useful for detecting or quantitating the polypeptide in tissue. The polypeptides of the invention can also be used as molecular weight markers, and as a food supplement.

[0023] Methods are also provided for preventing, treating, or ameliorating a medical condition which comprises the step of administering to a mammalian subject a therapeutically effective amount of a composition comprising a polypeptide of the present invention and a pharmaceutically acceptable carrier.

[0024] In particular, the polypeptides and polynucleotides of the invention can be utilized, for example, in methods for the prevention and/or treatment of disorders involving aberrant protein expression or biological activity.

[0025] The present invention further relates to methods for detecting the presence of the polynucleotides or polypeptides of the invention in a sample. Such methods can, for example, be utilized as part of prognostic and diagnostic evaluation of disorders as recited herein and for the identification of subjects exhibiting a predisposition to such conditions. The invention provides a method for detecting the polynucleotides of the invention in a sample, comprising contacting the sample with a compound that binds to and forms a complex with the polynucleotide of interest for a period sufficient to form the complex and under conditions sufficient to form a complex and detecting the complex such that if a complex is detected, the polynucleotide of interest is detected. The invention also provides a method for detecting the polypeptides of the invention in a sample comprising contacting the sample with a compound that binds to and forms a complex with the polypeptide under conditions and for a period sufficient to form the complex and detecting the formation of the complex such that if a complex is formed, the polypeptide is detected.

[0026] The invention also provides kits comprising polynucleotide probes and/or monoclonal antibodies, and optionally quantitative standards, for carrying out methods of the invention. Furthermore, the invention provides methods for evaluating the efficacy of drugs, and monitoring the progress of patients, involved in clinical trials for the treatment of disorders as recited above.

[0027] The invention also provides methods for the identification of compounds that modulate (i.e., increase or decrease) the expression or activity of the polynucleotides and/or polypeptides of the invention. Such methods can be utilized, for example, for the identification of compounds that can ameliorate symptoms of disorders as recited herein. Such methods can include, but are not limited to, assays for identifying compounds and other substances that interact with (e.g., bind to) the polypeptides of the invention. The invention provides a method for identifying a compound that binds to the polypeptides of the invention comprising contacting the compound with a polypeptide of the invention in a cell for a time sufficient to form a polypeptide/compound complex, wherein the complex drives expression of a reporter gene sequence in the cell; and detecting the complex by detecting the reporter gene sequence expression such that if expression of the reporter gene is detected the compound that binds to a polypeptide of the invention is identified.

[0028] The methods of the invention also provide methods for treatment which involve the administration of the polynucleotides or polypeptides of the invention to individuals exhibiting symptoms or tendencies. In addition, the invention encompasses methods for treating diseases or disorders as recited herein comprising administering compounds and other substances that modulate the overall activity of the target gene products. Compounds and other substances can affect such modulation either on the level of target gene/protein expression or target protein activity.

[0029] The polypeptides of the present invention and the polynucleotides encoding them are also useful for the same functions known to one of skill in the art as the polypeptides and polynucleotides to which they have homology (set forth in Table 2); for which they have a signature region (as set forth in Table 3); or for which they have homology to a gene family (as set forth in Table 4). If no homology is set forth for a sequence, then the polypeptides and polynucleotides of the present invention are useful for a variety of applications, as described herein, including use in arrays for detection.

### 4. DETAILED DESCRIPTION OF THE INVENTION

[0030] 4.1 Definitions

[0031] It must be noted that as used herein and in the appended claims, the singular forms “a”, “an” and “the” include plural references unless the context clearly dictates otherwise.

[0032] The term “active” refers to those forms of the polypeptide which retain the biologic and/or immunologic activities of any naturally occurring polypeptide. According to the invention, the terms “biologically active” or “biological activity” refer to a protein or peptide having structural, regulatory or biochemical functions of a naturally occurring molecule. Likewise “immunologically active” or “immunological activity” refers to the capability of the natural, recombinant or synthetic polypeptide to induce a specific immune response in appropriate animals or cells and to bind with specific antibodies.

[0033] The term “activated cells” as used in this application are those cells which are engaged in extracellular or intracellular membrane trafficking, including the export of secretory or enzymatic molecules as part of a normal or disease process.

[0034] The terms “complementary” or “complemenatarity” refer to the natural binding of polynucleotides by base pairing. For example, the sequence 5′-AGT-3′ binds to the complementary sequence 3′-TCA-5′. Complementarity between two single-stranded molecules may be “partial” such that only certain portion(s) of the nucleic acids bind or it may be “complete” such that total complementarity exists between the single stranded molecules. The degree of complementarity between the nucleic acid strands has significant effects on the efficiency and strength of the hybridization between the nucleic acid strands.

[0035] The term “embryonic stem cells (ES)” refers to a cell that can give rise to many differentiated cell types in an embryo or an adult, including the germ cells The termi “germ line stem cells (GSCs)” refers to stem cells derived from primordial stem cells that provide a steady and continuous source of germ cells for the production of gametes. The term “primordial germ cells (PGCs)” refers to a small population of cells set aside from other cell lineages particularly from the yolk sac, mesenteries, or gonadal ridges during embryogenesis that have the potential to differentiate into germ cells and other cells. PGCs are the source from which GSCs and ES cells are derived. The PGCs, the GSCs and the ES cells are capable of self-renewal. Thus these cells not only populate the germ line and give rise to a plurality of terminally differentiated cells that comprise the adult specialized organs, but are able to regenerate themselves.

[0036] The term “expression modulating fragment,” EMF, means a series of nucleotides which modulates the expression of an operably linked ORF or another EMF.

[0037] As used herein, a sequence is said to “modulate the expression of an operably linked sequence” when the expression of the sequence is altered by the presence of the EMF. EMFs include, but are not limited to, promoters, and promoter modulating sequences (inducible elements). One class of EMFs are nucleic acid fragments which induce the expression of an operably linked ORF in response to a specific regulatory factor or physiological event.

[0038] The terms “nucleotide sequence” or “nucleic acid” or “polynucleotide” or “oligonucleotide” are used interchangeably and refer to a heteropolymer of nucleotides or the sequence of these nucleotides. These phrases also refer to DNA or RNA of genomic or synthetic origin which may be single-stranded or double-stranded and may represent the sense or the antisense strand, to peptide nucleic acid (PNA) or to any DNA-like or RNA-like material. In the sequences herein A is adenine, C is cytosine, T is thyrnine, G is guanine and N is A, C, G, or T (U) or unknown. It is contemplated that where the polynucleotide is RNA, the T (thymine) in the sequences provided herein is substituted with U (uracil). Generally, nucleic acid segments provided by this invention may be assembled from fragments of the genome and short oligonucleotide linkers, or from a series of oligonucleotides, or from individual nucleotides, to provide a synthetic nucleic acid which is capable of being expressed in a recombinant transcriptional unit comprising regulatory elements derived from a microbial or viral operon, or a eukaryotic gene.

[0039] The terms “oligonucleotide fragment” or a “polynucleotide fragment”, “portion,” or “segment” or “probe” or “primer” are used interchangeably and refer to a sequence of nucleotide residues which are at least about 5 nucleotides, more preferably at least about 7 nucleotides, more preferably at least about 9 nucleotides, more preferably at least about 1 1 nucleotides and most preferably at least about 17 nucleotides. The fragment is preferably less than about 500 nucleotides, preferably less than about 200 nucleotides, more preferably less than about 100 nucleotides, more preferably less than about 50 nucleotides and most preferably less than 30 nucleotides. Preferably the probe is from about 6 nucleotides to about 200 nucleotides, preferably from about 15 to about 50 nucleotides, more preferably from about 17 to 30 nucleotides and most preferably from about 20 to 25 nucleotides. Preferably the fragments can be used in polymerase chain reaction (PCR), various hybridization procedures, or microarray procedures to identify or amplify identical or related parts of mRNA or DNA molecules. A fragment or segment may uniquely identify each polynucleotide sequence of the present invention. Preferably the fragment comprises a sequence substantially similar to any one of SEQ ID NO: 1-124, or 249-330.

[0040] Probes may, for example, be used to determine whether specific mRNA molecules are present in a cell or tissue or to isolate similar nucleic acid sequences from chromosomal DNA as described by Walsh et al. (Walsh, P. S. et al., 1992, PCR Methods Appl 1:241-250). They may be labeled by nick translation, Kleniow fill-in reaction, PCR, or other methods well known in the art. Probes of the present invention, their preparation and/or labeling are elaborated in Sambrook, J. et al., 1989, Molecular Cloning: A Laboratory Manual, Cold Spring Harbor Laboratory, New York; or Ausubel, F. M. et al., 1989, Current Protocols in Molecular Biology, John Wiley & Sons, New York N.Y., both of which are incorporated herein by reference in their entirety.

[0041] The nucleic acid sequences of the present invention also include the sequence information from the nucleic acid sequences of SEQ ID NO: 1-124, or 249-330. The sequence information can be a segment of any one of SEQ ID NO: 1-124, or 249-330 that uniquely identifies or represents the sequence information of that sequence of SEQ ID NO: 1-124, or 249-330, or those segments identified in Tables 3, 5, 6, and 8. One such segment can be a twenty-mer nucleic acid sequence because the probability that a twenty- mer is fully matched in the human genome is 1 in 300. In the human genome, there are three billion base pairs in one set of chromosomes. Because 420 possible twenty-mers exist, there are 300 times more twenty-mers than there are base pairs in a set of human chromosomes. Using the same analysis, the probability for a seventeen-mer to be fully matched in the human genome is approximately 1 in 5. When these segments are used in arrays for expression studies, fifteen-mer segments can be used. The probability that the fifteen-mer is fully matched in the expressed sequences is also approximately one in five because expressed sequences comprise less than approximately 5% of the entire genome sequence.

[0042] Similarly, when using sequence information for detecting a single mismatch, a segment can be a twenty-five mer. The probability that the twenty-five mer would appear in a human genome with a single mismatch is calculated by multiplying the probability for a full match (1.425) times the increased probability for mismatch at each nucleotide position (3×25). The probability that an eighteen mer with a single mismatch can be detected in an array for expression studies is approximately one in five. The probability that a twenty-mer with a single mismatch can be detected in a human genome is approximately one in five.

[0043] The term “open reading frame,” ORF, means a series of nucleotide triplets coding for amino acids without any termination codons and is a sequence translatable into protein.

[0044] The terms “operably linked” or “operably associated” refer to functionally related nucleic acid sequences. For example, a promoter is operably associated or operably linked with a coding sequence if the promoter controls the transcription of the coding sequence. While operably linked nucleic acid sequences can be contiguous and in the same reading frame, certain genetic elements e.g. repressor genes are not contiguously linked to the coding sequence but still control transcription/translation of the coding sequence.

[0045] The term “pluripotent” refers to the capability of a cell to differentiate into a number of differentiated cell types that are present in an adult organism. A pluripotent cell is restricted in its differentiation capability in comparison to a totipotent cell.

[0046] The terms “polypeptide” or “peptide” or “amino acid sequence” refer to an oligopeptide, peptide, polyp eptide or protein sequence or fragment thereof and to naturally occurring or synthetic molecules. A polypeptide “fragment,” “portion,” or “segment” is a stretch of amino acid residues of at least about 5 amino acids, preferably at least about 7 amino acids, more preferably at least about 9 amino acids and most preferably at least about 17 or more amino acids. The peptide preferably is not greater than about 200 amino acids, more preferably less than 150 amino acids and most } preferably less than 100 amino acids. Preferably the peptide is from about 5 to about 200 amino acids. To be active, any polypeptide must have sufficient length to display biological and/or immunological activity.

[0047] The term “naturally occurring polypeptide” refers to polypeptides produced by cells that have not been genetically engineered and specifically contemplates various polypeptides arising from post-translational modifications of the polypeptide including, but not limited to, acetylation, carboxylation, glycosylation, phosphorylation, lipidation and acylation.

[0048] The term “translated protein coding portion” means a sequence which encodes for the full-length protein which may include any leader sequence or any processing sequence.

[0049] The term “mature protein coding sequence” means a sequence which encodes a peptide or protein without a signal or leader sequence. The “mature protein portion” means that portion of the protein which does not include a signal or leader sequence. The peptide may have been produced by processing in the cell which removes any leader/signal sequence. The mature protein portion may or may not include the initial methionine residue. The methionine residue may be removed from the protein during processing in the cell. The peptide may be produced synthetically or the protein may have been produced usilng a polynucleotide only encoding for the mature protein coding sequence.

[0050] The term “derivative” refers to polypeptides chemically modified by such techniques as ubiquitination, labeling (e.g., with radionuclides or various enzymes), covalent polymer attachment such as pegylation (derivatization with polyethylene glycol) and insertion or substitution by chemical synthesis of amino acids such as ornithine, which do not normally occur in human proteins.

[0051] The term “variant” (or “analog”) refers to any polypeptide differing from naturally occurring polypeptides by amino acid insertions, deletions, and substitutions, created using, e g., recombinant DNA techniques. Guidance in determining which amino acid residues may be replaced, added or deleted without abolishing activities of interest, may be found by comparing the sequence of the particular polypeptide with that of homologous peptides and minimizing the number of amino acid sequence changes made in regions of high homology (conserved regions) or by replacing amino acids with consensus sequence.

[0052] Alternatively, recombinant variants encoding these same or similar polypeptides may be synthesized or selected by making use of the “redundancy” in the genetic code. Various codon substitutions, such as the silent changes which produce various restriction sites, may be introduced to optimize cloning into a plasmid or viral vector or expression in a particular prokaryotic or eukaryotic system. Mutations in the polynucleotide sequence may be reflected in the polypeptide or domains of other peptides added to the polypeptide to modify the properties of any part of the polypeptide, to change characteristics such as ligand-binding affinities, interchain affinities, or degradation/turnover rate.

[0053] Preferably, amino acid “substitutions” are the result of replacing one amino acid with another amino acid having similar structural and/or chemical properties, i.e., conservative amino acid replacements. “Conservative” amino acid substitutions may be made on the basis of similarity in polarity, charge, solubility, hydrophobicity, hydrophilicity, and/or the amphipathic nature of the residues involved. For example, nonpolar (hydrophobic) amino acids include alanine, leucine, isoleucine, valine, proline, All phenylalanine, tryptophan, and methionine; polar neutral amino acids include glycine, serine, threonine, cysteine, tyrosine, asparagine, and glutamine; positively charged (basic) amino acids include arginine, lysine, and histidine; and negatively charged (acidic) amino acids include aspartic acid and glutamic acid. “Insertions” or “deletions” are preferably in the range of about 1 to 20 amino acids, more preferably 1 to 10 amino acids. The variation allowed may be experimentally determined by systematically making insertions, deletions, or substitutions of amino acids in a polypeptide molecule using recombinant DNA techniques and assaying the resulting recombinant variants for activity.

[0054] Alternatively, where alteration of function is desired, insertions, deletions or non-conservative alterations can be engineered to produce altered polypeptides. Such alterations can, for example, alter one or more of the biological functions or biochemical characteristics of the polypeptides of the invention. For, example, such alterations may change polypeptide characteristics such as ligand-binding affinities, interchain affinities, or degradation/turnover rate. Further, such alterations can be selected so as to generate polypeptides that are better suited for expression, scale up and the like in the host cells chosen for expression. For example, cysteine residues can be deleted or substituted with another amino acid residue in order to eliminate disulfide bridges.

[0055] The terms “purified” or “substantially purified” as used herein denotes that the indicated nucleic acid or polypeptide is present in the substantial absence of other biological macromolecules, e.g., polynucleotides, proteins, and the like. In one embodiment, the polylnucleotide or polypeptide is purified such that it constitutes at least 95% by weight, more preferably at least 99% by weight, of the indicated biological macromolecules present (but water, buffers, and other small molecules, especially molecules having a molecular weight of less than 1000 daltons, can be present).

[0056] The term “isolated” as used herein refers to a nucleic acid or polypeptide separated from at least one other component (e.g., nucleic acid or polypeptide) present with the nucleic acid or polypeptide in its natural source. In one embodiment, the nucleic acid or polypeptide is found in the presence of (if anything) only a solvent, buffer, ion, or other component normally present in a solution of the same. The terms “isolated” and “purified” do not encompass nucleic acids or polypeptides present in their natural source.

[0057] The term “recombinant,” when used herein to refer to a polypeptide or protein, means that a polypeptide or protein is derived fiom recombinant (e.g., microbial, insect, or mammalian) expression systems. “Microbial” refers to recombinant polypeptides or proteins made in bacterial or fungal (e.g., yeast) expression systems. As a product, “recombinant microbial” defines a polypeptide or protein essentially free of native endogenous substances and unaccompanied by associated native glycosylation. Polypeptides or proteins expressed in most bacterial cultures, e.g., E. coli, will be free of glycosylation modifications; polypeptides or proteins expressed in yeast will have a glycosylation pattern in general different from those expressed in mammalian cells.

[0058] The term “recombinant expression vehicle or vector” refers to a plasmid or phage or virus or vector, for expressing a polypeptide from a DNA (RNA) sequence. An expression vehicle can comprise a transcriptional unit comprising an assembly of (1) a genetic element or elements having a regulatory role in gene expression, for example, promoters or enhancers, (2) a structural or coding sequence which is transcribed into mRNA and translated into protein, and (3) appropriate transcription initiation and termination sequences. Structural units intended for use in yeast or eukaryotic expression systems preferably include a leader sequence enabling extracellular secretion of translated protein by a host cell. Alternatively, where recombinant protein is expressed without a leader or transport sequence, it may include an amino termninal metlionine residue. This residue may or may not be subsequently cleaved from the expressed recombinant protein to provide a final product.

[0059] The term “recombinant expression system” means host cells which have stably integrated a recombinant transcriptional unit into chromosomal DNA or carry the recombinant transcriptional unit extrachromosomally. Recombinant expression systems as defined herein will express heterologous polypeptides or proteins upon induction of the regulatory elements linlked to the DNA segment or synthetic gene to be expressed. This term also means host cells which have stably integrated a recombinant genetic element or elements having a regulatory role in gene expression, for example, promoters or enhancers. Recombinant expression systems as defined herein will express polypeptides or proteins endogenous to the cell upon induction of the regulatory elements linked to the endogenous DNA segment or gene to be expressed. The cells can be prokaryotic or eukaryotic.

[0060] The term “secreted” includes a protein that is transported across or through a membrane, including transport as a result of signal sequences in its amino acid sequence when it is expressed in a suitable host cell. “Secreted” proteins include without limitation proteins secreted wholly (e.g., soluble proteins) or partially (e.g., receptors) from the cell in which they are expressed. “Secreted” proteins also include without limitation proteins that are transported across the membrane of the endoplasmic reticulum. “Secreted” proteins are also intended to include proteins containing non-typical signal sequences (e.g. Interleukin-1 Beta, see Krasney, P. A. and Young, P. R. (1992) Cytokine 4(2): 134 -143) and factors released from damaged cells (e.g. Interleukin-1 Receptor Antagonist, see Arend, W. P. et. al. (1998) Annu. Rev. lnnunol. 16:27-55)

[0061] Where desired, an expression vector may be designed to contain a “signal or leader sequence” which will direct the polypeptide through the membrane of a cell. Such a sequence may be naturally present on the polypeptides of the present invention or provided from heterologous protein sources by recombinant DNA techniques.

[0062] The term “stringent” is used to refer to conditions that are commonly understood in the art as stringent. Stringent conditions can include highly stringent conditions (i.e., hybridization to filter-bound DNA in 0.5 M NaHPO₄, 7% sodium dodecyl sulfate (SDS), 1 mM EDTA at 65° C., and washing in 0.1×SSC/0.1% SDS at 68° C.), and moderately stringent conditions (i.e., washing in 0.2×SSC/0.1% SDS at 42° C.). Other exemplary hybridization conditions are described herein in the examples.

[0063] In instances of hybridization of deoxyoligonucleotides, additional exemplary stringent hybridization conditions include washing in 6×SSC/0.05% sodium pyrophosphate at 37° C. (for 14-base oligonucleotides), 48° C. (for 17-base oligonucleotides), 55° C. (for 20-base oligonucleotides), and 60° C. (for 23-base oligonucleotides).

[0064] As used herein, “substantially equivalent” or “substantially similar” can refer both to nucleotide and amino acid sequences, for example a mutant sequence, that varies from a reference sequence by one or more substitutions, deletions, or additions, the net effect of which does not result in an adverse functional dissimilarity between the reference and subject sequences. Typically, such a substantially equivalent sequence varies from one of those listed herein by no more than about 35 % (i.e., the number of individual residue substitutions, additions, and/or deletions in a substantially equivalent sequence, as compared to the corresponding reference sequence, divided by the total number of residues in the substantially equivalent sequence is about 0.35 or less). Such a sequence is said to have 65% sequence identity to the listed sequence. In one embodiment, a substantially equivalent, e.g., mutant, sequence of the invention varies from a listed sequence by no more than 30% (70% sequence identity); in a variation of this embodiment, by no more than 25% (75% sequence identity); and in a further variation of this embodiment, by no more than 20% (80% sequence identity) and in a further variation of this embodiment, by no more than 10% (90% sequence identity) and in a further variation of this embodiment, by no more that 5% (95% sequence identity). Substantially equivalent, e.g., mutant, amino acid sequences according to the invention preferably have at least 80% sequence identity with a listed amino acid sequence, more preferably at least 85% sequence identity, more preferably at least 90% sequence identity, more preferably at least 95% sequence identity, more preferably at least 98% sequence identity, and most preferably at least 99% sequence identity. Substantially equivalent nucleotide sequence of the invention can have lower percent sequence identities, taking into account, for example, the redundancy or degeneracy of the genetic code. Preferably, the nucleotide sequence has at least about 65% identity, more preferably at least about 75% identity, more preferably at least about 80% sequence identity, more preferably at least 85% sequence identity, more preferably at least 90% sequence identity, more preferably at least about 95% sequence identity, more preferably at least 98% sequence identity, and most preferably at least 99% sequence identity. For the purposes of the present invention, sequences having substantially equivalent biological activity and substantially equivalent expression characteristics are considered substantially equivalent. For the purposes of determining equivalence, truncation of the mature sequence (e.g., via a mutation which creates a new stop codon) should be disregarded. Sequence identity may be determined, e.g., using the Jotun Hein method (Hein, J. (1990) Methods Enzymol. 183:626-645). Identity between sequences can also be determined by other methods known in the art, e.g. by varying hybridization conditions.

[0065] The term “totipotent” refers to the capability of a cell to differentiate into all of the cell types of an adult organism.

[0066] The term “transformation” means introducing DNA into a suitable host cell so that the DNA is replicable, either as an extrachromosomal element, or by chromosomal integration. The term “transfection” refers to the taking up of an expression vector by a suitable host cell, whether or not any coding sequences are in fact expressed. The term “infection” refers to the introduction of nucleic acids into a suitable host cell by use of a virus or viral vector.

[0067] As used herein, an “uptake modulating fragment,” UMF, means a series of nucleotides which mediate the uptake of a linked DNA fragment into a cell. UMFs can be readily identified using known UMFs as a target sequence or target motif with the computer-based systems described below. The presence and activity of a UMF can be confirmed by attaching the suspected UMF to a marker sequence. The resulting nucleic acid molecule is then incubated with an appropriate host under appropriate conditions and the uptake of the marker sequence is determined. As described above, a UMF will increase the frequency of uptake of a linked marker sequence.

[0068] Each of the above terms is meant to encompass all that is described for each, unless the context dictates otherwise.

[0069] 4.2 Nucleic Acids of the Invention

[0070] Nucleotide sequences of the invention are set forth in the Sequence Listing.

[0071] The isolated polynucleotides of the invention include a polynucleotide comprising the nucleotide sequences of SEQ ID NO: 1-124, or 249-330; a polynucleotide encoding any one of the peptide sequences of SEQ ID NO: 1-124, or 249-330; and a polynucleotide comprising the nucleotide sequence encoding the mature protein coding sequence of the polynucleotides of any one of SEQ ID NO: 1-124, or 249-330. The polynucleotides of the present invention also include, but are not limited to, a polynucleotide that hybridizes under stringent conditions to (a) the complement of any of the nucleotides sequences of SEQ ID NO: 1-124, or 249-330; (b) nucleotide sequences encoding any one of the amino acid sequences set forth in the Sequence Listing, or Table 8; (c) a polynucleotide which is an allelic variant of any polynucleotide recited above; (d) a polynucleotide which encodes a species homolog of any of the proteins recited above; or (e) a polynucleotide that encodes a polypeptide comprising a specific domain or truncation of the polypeptides of SEQ ED NO: 125-248, or 331-412 (for example, as set forth in Tables 3, 5, 6, or 8). Domains of interest may depend on the nature of the encoded polypeptide; e.g., domains in receptor-like polypeptides include ligand-binding, extracellular, transmembrane, or cytoplasmic domains, or combinations thereof, domains in inmunoglobulin-like proteins include the variable inmmunoglobulin-like domains; domains in enzyme-like polypeptides include catalytic and substrate binding domains; and domains in ligand polypeptides include receptor-binding domains.

[0072] The polynucleotides of the invention include naturally occurring or wholly or partially synthetic DNA, e.g., cDNA and genomic DNA, and RNA, e.g., mRNA. The polynucleotides may include entire coding region of the cDNA or may represent a portion of the coding region of the cDNA.

[0073] The present invention also provides genes corresponding to the cDNA sequences disclosed herein. The corresponding genes can be isolated in accordance with known methods using the sequence information disclosed herein. Such methods include the preparation of probes or primers from the disclosed sequence information for identification and/or amplification of genes in appropriate genomic libraries or other sources of genomic materials. Further 5′ and 3′ sequence can be obtained using methods known in the art. For example, fall length eDNA or genomic DNA that corresponds to any of the polynucleotides of SEQ ID NO: 1-124, or 249-330 can be obtained by screening appropriate cDNA or genomic DNA libraries under suitable hybridization conditions using any of the polynucleotides of SEQ ID NO: 1-124, or 249-330 or a portion thereof as a probe. Alternatively, the polynucleotides of SEQ ID NO: 1-124, or 249-330 may be used as the basis for suitable primer(s) that allow identification and/or amplification of genes in appropriate genomic DNA or cDNA libraries.

[0074] The nucleic acid sequences of the invention can be assembled from ESTs and sequences (including cDNA and genomic sequences) obtained from one or more public databases, such as dbEST, gbpri, and UniGene. The EST sequences can provide identifying sequence information, representative fragment or segment information, or novel segment information for the full-length gene.

[0075] The polynucleotides of the invention also provide polynucleotides including nucleotide sequences that are substantially equivalent to the polynucleotides recited above. Polynucleotides according to the invention can have, e.g., at least about 65%, at least about 70%, at least about 75%, at least about 80%, 81%, 82%, 83%, 84%, more typically at least about 85%, 86%, 87%, 88%, 89%, more typically at least about 90%, 91%, 92%, 93%, 94%, and even more typically at least about 95%, 96%, 97%, 98%, 99% sequence identity to a polynucleotide recited above.

[0076] Included within the scope of the nucleic acid sequences of the invention are nucleic acid sequence fragments that hybridize under stringent conditions to any of the nucleotide sequences of SEQ ID NO: 1-124, or 249-330, or complements thereof, which fragment is greater than about 5 nucleotides, preferably 7 nucleotides, more preferably greater than 9 nucleotides and most preferably greater than 17 nucleotides. Fragments of, e.g. 15, 17, or 20 nucleotides or more that are selective for (i.e. specifically hybridize to) any one of the polynucleotides of the invention are contemplated. Probes capable of specifically hybridizing to a polynucleotide can differentiate polynucleotide sequences of the invention from other polynucleotide sequences in the same family of genes or can differentiate human genes from genes of other species, and are preferably based on unique nucleotide sequences.

[0077] The sequences falling within the scope of the present invention are not limited to these specific sequences, but also include allelic and species variations thereof. Allelic and species variations can be routinely determined by comparing the sequence provided in SEQ ID NO: 1-124, or 249-330, a representative fragment thereof, or a nucleotide sequence at least 90% identical, preferably 95% identical, to SEQ ID NO: 1-124, or 249-330 with a sequence from another isolate of the same species. Furthermore, to accommodate codon variability, the invention includes nucleic acid molecules coding for the same amino acid sequences as do the specific ORFs disclosed herein. In other words, in the coding region of an ORF, substitution of one codon for another codon that encodes the same amino acid is expressly contemplated.

[0078] The nearest neighbor or homology results for the nucleic acids of the present invention, including SEQ ID NO: 1-124, or 249-330 can be obtained by searching a database using an algorithm or a program. Preferably, a BLAST (Basic Local Alignment Search Tool) program is used to search for local sequence alignments (Altshul, S. F. J Mol. Evol. 36 290-300 (1993) and Altschul S. F. et al. J. Mol. Biol. 21:403-410 (1990)). Alternatively a FASTA version 3 search against Genpept, using FASTXY algorithm may be performed.

[0079] Species homologs (or orthologs) of the disclosed polynucleotides and proteins are also provided by the present invention. Species homologs may be isolated and identified by maling suitable probes or primers from the sequences provided herein and screening a suitable nucleic acid source from the desired species.

[0080] The invention also encompasses allelic variants of the disclosed polynucleotides or proteins; that is, naturally-occurring alternative forms of the isolated polynucleotide which also encode proteins which are identical, homologous or related to that encoded by the polynucleotides.

[0081] The nucleic acid sequences of the invention are further directed to sequences which encode variants of the described nucleic acids. These amino acid sequence variants may be prepared by methods known in the art by introducing appropriate nucleotide changes into a native or variant polynucleotide. There are two variables in the construction of amino acid sequence variants: the location of the mutation and the nature of the mutation. Nucleic acids encoding the amino acid sequence variants are preferably constructed by mutating the polynucleotide to encode an amino acid sequence that does not occur in nature. These nucleic acid alterations can be made at sites that differ in the nucleic acids from different species (variable positions) or in highly conserved regions (constant regions). Sites at such locations will typically be modified in series, e.g., by substituting first with conservative choices (e.g., hydrophobic amino acid to a different hydrophobic amino acid) and then with more distant choices (e.g., hydrophobic amino acid to a charged amino acid), and then deletions or insertions may be made at the target site. Amino acid sequence deletions generally range from about 1 to 30 residues, preferably about 1 to 10 residues, and are typically contiguous. Amino acid insertions include amino- and/or carboxyl-terminal fusions ranging in length from one to one hundred or more residues, as well as intrasequence insertions of single or multiple amino acid residues. Intrasequence insertions may range generally from about 1 to 10 amino residues, preferably from 1 to 5 residues. Examples of terminal insertions include the heterologous signal sequences necessary for secretion or for intracellular targeting in different host cells and sequences such as FLAG or poly-histidine sequences useful for purifying the expressed protein.

[0082] In a preferred method, polynucleotides encoding the novel amino acid sequences are changed via site-directed mutagenesis. This method uses oligonucleotide sequences to alter a polynucleotide to encode the desired amino acid variant, as well as sufficient adjacent nucleotides on both sides of the changed amino acid to form a stable duplex on either side of the site of being changed. In general, the techniques of site-directed mutagenesis are well known to those of skill in the art and this technique is exemplified by publications such as, Edelman et al., DNA 2:183 (1983). A versatile and efficient method for producing site-specific changes in a polynucleotide sequence was published by Zoller and Smith, Nucleic Acids Res. 10:6487-6500 (1982). PCR may also be used to create amino acid sequence variants of the novel nucleic acids. When small amounts of template DNA are used as starting material, primer(s) that differs slightly in sequence from the corresponding region in the template DNA can generate the desired amino acid variant. PCR amplification results in a population of product DNA fragments that differ from the polynucleotide template encoding the polypeptide at the position specified by the primer. The product DNA fragments replace the corresponding region in the plasmid and this gives a polynucleotide encoding the desired amino acid variant.

[0083] A further technique for generating amino acid variants is the cassette mutagenesis technique described in Wells et al., Gene 34:315 (1985); and other mutagenesis techniques well known in the art, such as, for example, the techniques in Sambrook et al., supra, and Current Protocols in Molecular Biology, Ausubel et al. Due to the inherent degeneracy of the genetic code, other DNA sequences which encode substantially the same or a functionally equivalent amino acid sequence may be used in the practice of the invention for the cloning and expression of these novel nucleic acids. Such DNA sequences include those which are capable of hybridizing to the appropriate novel nucleic acid sequence under stringent conditions.

[0084] Polynucleotides encoding preferred polypeptide truncations of the invention could be used to generate polynucleotides encoding chimeric or fusion proteins comprising one or more domains of the invention and heterologous protein sequences.

[0085] The polynucleotides of the invention additionally include the complement of any of the polynucleotides recited above. The polynucleotide can be DNA (genomic, cDNA, amplified, or synthetic) or RNA. Methods and algorithms for obtaining such polynucleotides are well known to those of skill in the art and can include, for example, methods for determining hybridization conditions that can routinely isolate polynucleotides of the desired sequence identities.

[0086] In accordance with the invention, polynucleotide sequences comprising the mature protein coding sequences corresponding to any one of SEQ ID NO: 1-124, or 249-330, or functional equivalents thereof, may be used to generate recombinant DNA molecules that direct the expression of that nucleic acid, or a functional equivalent thereof, in appropriate host cells. Also included are the cDNA inserts of any of the clones identified herein.

[0087] A polynucleotide according to the invention can be joined to any of a variety of other nucleotide sequences by well-established recombinant DNA techniques (see Sambrook J et al. (1989) Molecular Cloning: A Laboratory Manual, Cold Spring Harbor Laboratory, New York). Useful nucleotide sequences for joining to polynucleotides include an assortment of vectors, e.g., plasmids, cosmids, lambda phage derivatives, phagemids, and the like, that are well known in the art. Accordingly, the invention also provides a vector including a polynucleotide of the invention and a host cell containing the polynucleotide. In general, the vector contains an origin of replication functional in at least one organism, convenient restriction endonuclease sites, and a selectable marker for the host cell. Vectors according to the invention include expression vectors, replication vectors, probe generation vectors, and sequencing vectors. A host cell according to the invention can be a prokaryotic or eukaryotic cell and can be a unicellular organism or part of a multicellular organism.

[0088] The present invention further provides recombinant constructs comprising a nucleic acid having any of the nucleotide sequences of SEQ ID NO: 1-124, or 249-330 or a fragment thereof or any other polynucleotides of the invention. In one embodiment, the recombinant constructs of the present invention comprise a vector, such as a plasmid or viral vector, into which a nucleic acid having any of the nucleotide sequences of SEQ ID NO: 1-124, or 249-330 or a fragment thereof is inserted, in a forward or reverse orientation. In the case of a vector comprising one of the ORFs of the present invention, the vector may further comprise regulatory sequences, including for example, a promoter, operably linked to the ORF. Large numbers of suitable vectors and promoters are known to those of skill in the art and are commercially available for generating the recombinant constructs of the present invention. The following vectors are provided by way of example: Bacterial: pBs, phagescript, PsiXl74, pBluescript SK, pBs KS, pNH8a, pNH16a, pNH18a, pNH46a (Stratagene), pTrc99A, pKK223-3, pKK233-3, pDR540, pRIT5 (Pharmacia); Eukaryotic: pWLneo, pSV2cat, pOG44, PXTI, pSG (Stratagene) pSVK3, pBPV, pMSG, pSVL (Pharmacia).

[0089] The isolated polynucleotide of the invention may be operably linked to an expression control sequence such as the pMT2 or pED expression vectors disclosed in Kaufman et al., Nucleic Acids Res. 19, 4485-4490 (1991), in order to produce the protein recombinantly. Many suitable expression control sequences are known in the art. General methods of expressing recombinant proteins are also known and are exemplified in R. Kaufman, Methods in Enzymology 185, 537-566 (1990). As defined herein “operably linked” means that the isolated polynucleotide of the invention and an expression control sequence are situated within a vector or cell in such a way that the protein is expressed by a host cell which has been transformed (transfected) with the ligated polynucleotide/expression control sequence.

[0090] Promoter regions can be selected from any desired gene using CAT (chloramphenicol transferase) vectors or other vectors with selectable markers. Two appropriate vectors are pKK232-8 and pCM7. Particular named bacterial promoters include lacd, lacZ, T3, T7, gpt, lambda PR, and trc. Eukaryotic promoters include CMV immediate early, HSV thymidine kinase, early and late SV40, LTRs from retrovirus, and mouse metallothionein-I. Selection of the appropriate vector and promoter is well within the level of ordinary skill in the art. Generally, recombinant expression vectors will include origins of replication and selectable markers permitting transformation of the host cell, e.g., the ampicillin resistance gene of E. coli and S. cerevisiae TRP 1 gene, and a promoter derived from a highly expressed gene to direct transcription of a downstream structural sequence. Such promoters can be derived from operons encoding glycolytic enzymes such as 3-phosphoglycerate kinase (PGK), a-factor, acid phosphatase, or heat shock proteins, among others. The heterologous structural sequence is assembled in appropriate phase with translation initiation and termination sequences, and preferably, a leader sequence capable of directing secretion of translated protein into the periplasmic space or extracellular medium. Optionally, the heterologous sequence can encode a fusion protein including an amino terminal identification peptide imparting desired characteristics, e.g., stabilization or simplified purification of expressed recombinant product. Useful expression vectors for bacterial use are constructed by inserting a structural DNA sequence encoding a desired protein together with suitable translation initiation and termination signals in operable reading phase with a funictional promoter. The vector will comprise one or more phenotypic selectable markers and an origin of replication to ensure maintenance of the vector and to, if desirable, provide amplification within the host. Suitable prokaryotic hosts for transformation include E. coli, Bacillus subtilis, Salmonella typhimurium and various species within the genera Pseudomonas, SIreptomyces, and Staphylococcus, although others may also be employed as a matter of choice.

[0091] As a representative but non-limiting example, useful expression vectors for bacterial use can comprise a selectable marker and bacterial origin of replication derived from commercially available plasmids comprising genetic elements of the well known cloning vector pBR322 (ATCC 37017). Such commercial vectors include, for example, pKK223-3 (Pharmacia Fine Chemicals, Uppsala, Sweden) and GEM 1 (Promega Biotech, Madison, Wis., USA). These pBR322 “backbone” sections are combined with an appropriate promoter and the structural sequence to be expressed. Following transformation of a suitable host strain and growth of the host strain to an appropriate cell density, the selected promoter is induced or derepressed by appropriate means (e.g., temperature shift or chemical induction) and cells are cultured for an additional period. Cells are typically harvested by centrifugation, disrupted by physical or chemical means, and the resulting crude extract retained for further purification.

[0092] Polynucleotides of the invention can also be used to induce immune responses. For example, as described in Fan et al., Nat. Biotech 17, 870-872 (1999), incorporated herein by reference, nucleic acid sequences encoding a polypeptide may be used to generate antibodies against the encoded polypeptide following topical administration of naked plasmid DNA or following injection, and preferably intramuscular injection of the DNA. The nucleic acid sequences are preferably inserted in a recombinant expression vector and may be in the form of naked DNA.

[0093] 4.3 Antisense

[0094] Another aspect of the invention pertains to isolated antisense nucleic acid molecules that are hybridizable to or complementary to the nucleic acid molecule comprising the nucleotide sequence of SEQ ID NO: 1-124, or 249-330, or fragments, analogs or derivatives thereof. An “antisense” nucleic acid comprises a nucleotide sequence that is complementary to a “sense” nucleic acid encoding a protein, e.g., complementary to the coding strand of a double-stranded cDNA molecule or complementary to an mRNA sequence. In specific aspects, antisense nucleic acid molecules are provided that comprise a sequence complementary to at least about 10, 25, 50, 100, 250 or 500 nucleotides or an entire coding strand, or to only a portion thereof. Nucleic acid molecules encoding fragments, homologs, derivatives and analogs of a protein of any of SEQ ID NO: 1-124, or 249-330 or antisense nucleic acids complementary to a nucleic acid sequence of SEQ ID NO: 1-124, or 249-330 are additionally provided.

[0095] In one embodiment, an antisense nucleic acid molecule is antisense to a “coding region” of the coding strand of a nucleotide sequence of the invention. The term “coding region” refers to the region of the nucleotide sequence comprising codons which are translated into amino acid residues. In another embodiment, the antisense nucleic acid molecule is antisense to a “noncoding region” of the coding strand of a nucleotide sequence of the invention. The term “noncoding region” refers to 5′ and 3′ sequences that flank the coding region that are not translated into amino acids (i.e., also referred to as 5′ and 3′ untranslated regions).

[0096] Given the coding strand sequences encoding a nucleic acid disclosed herein (e.g., SEQ ID NO: 1-124, or 249-330, antisense nucleic acids of the invention can be designed according to the rules of Watson and Crick or Hoogsteen base pairing. The antisense nucleic acid molecule can be complementary to the entire coding region of an mRNA, but more preferably is an oligonucleotide that is antisense to only a portion of the coding or noncoding region of an mRNA. For example, the antisense oligonucleotide can be complementary to the region surrounding the translation start site of an mRNA. An antisense oligonucleotide can be, for example, about 5, 10, 15, 20, 25, 30, 35, 40, 45 or 50 nucleotides in length. An antisense nucleic acid of the invention can be constructed using chemical synthesis or enzymatic ligation reactions using procedures known in the art. For example, an antisense nucleic acid (e.g., an antisense oligonucleotide) can be chemically synthesized using naturally occuning nucleotides or variously modified nucleotides designed to increase the biological stability of the molecules or to increase the physical stability of the duplex formed between the antisense and sense nucleic acids, eg., phosphorothioate derivatives and acridine substituted nucleotides can be used.

[0097] Examples of modified nucleotides that can be used to generate the antisense nucleic acid include: 5-fluorouracil, 5-bromouracil, 5-chlorouracil, 5-iodouracil, hypoxanthine, xanthine, 4-acetylcytosine, 5-(carboxyhydroxylmethyl) uracil, 5-carboxymethylaminomethyl-2-thiouridine, 5-carboxymethylaminomethyluracil, dihydrouracil, beta-D-galactosylqueosine, inosine, N6-isopentenyladenine, 1-methylguanine, 1-methylinosine, 2,2-dimethylguanine, 2-methyladenine, 2-methylguanine, 3-methylcytosine, 5-methylcytosine, N6-adenine, 7-methylguanine, 5-methylaminomethyluracil, 5-metlioxyaminomethyl-2-thiouracil, beta-D-mannosylqueosine, 5′-methoxycarboxymethyluracil, 5-methoxyuracil, 2-methylthio-N6-isopentenyladenine, uracil-5-oxyacetic acid (v), wybutoxosine, pseudouracil, queosine, 2-thiocytosine, 5-methyl-2-thiouracil, 2-thiouracil, 4-thiouracil, 5-methyluracil, uracil-5-oxyacetic acid methylester, uracil-5-oxyacetic acid (v), 5-methyl-2-thiouracil, 3-(3-amino-3-N-2-carboxypropyl) uracil, (acp3)w, and 2,6-diaminopurine. Alternatively, the antisense nucleic acid can be produced biologically using an expression vector into which a nucleic acid has been subdloned in an antisense orientation (i.e., RNA transcribed from the inserted nucleic acid will be of an antisense orientation to a target nucleic acid of interest, described further in the following subsection).

[0098] The antisense nucleic acid molecules of the invention are typically administered to a subject or generated in situ such that they hybridize with or bind to cellular mRNA and/or genomic DNA encoding a protein according to the invention to thereby inhibit expression of the protein, e.g., by inhibiting transcription and/or translation. The hybridization can be by conventional nucleotide complementarity to form a stable duplex, or, for example, in the case of an antisense nucleic acid molecule that binds to DNA duplexes, through specific interactions in the major groove of the double helix. An example of a route of administration of antisense nucleic acid molecules of the invention includes direct injection at a tissue site. Alternatively, antisense nucleic acid molecules can be modified to target selected cells and then administered systemically. For example, for systemic administration, antisense molecules can be modified such that they specifically bind to receptors or antigens expressed on a selected cell surface, e.g., by linking the antisense nucleic acid molecules to peptides or antibodies that bind to cell surface receptors or antigens. The antisense nucleic acid molecules can also be delivered to cells using the vectors described herein. To achieve sufficient intracellular concentrations of antisense molecules, vector constructs in which the antisense nucleic acid molecule is placed under the control of a strong pol II or pol III promoter are preferred.

[0099] In yet another embodiment, the antisense nucleic acid molecule of the invention is an α-anomeric nucleic acid molecule. An (x-anomeric nucleic acid molecule forms specific double-stranded hybrids with complementary RNA in which, contrary to the usual α-units, the strands run parallel to each other (Gaultier et al. (1987) Nucleic Acids Res 15: 6625-6641). The antisense nucleic acid molecule can also comprise a 2′-o-methylribonucleotide (lnoue et al. (1987) Nucleic Acids Res 15: 6131-6148) or a chimeric RNA -DNA analogue (Inoue et al. (1987) FEBS Lett 215: 327-330).

[0100] 4.4 Ribozymes and PNA Moieties

[0101] In still another embodiment, an antisense nucleic acid of the invention is a ribozyme. Ribozymes are catalytic RNA molecules with ribonuclease activity that are capable of cleaving a single-stranded nucleic acid, such as an mRNA, to which they have a complementary region. Thus, ribozymes (e.g., hammerhead ribozymes (described in Haselhoff and Gerlach (1988) Nature 334:585-591)) can be used to catalytically cleave mRNA transcripts to thereby inhibit translation of an mRNA. A ribozyme having specificity for a nucleic acid of the invention can be designed based upon the nucleotide sequence of a DNA disclosed herein (i.e., SEQ ID NO: 1-1 24, or 249-330). For example, a derivative of Tetrahymena L-19 IVS RNA can be constructed in which the nucleotide sequence of the active site is complementary to the nucleotide sequence to be cleaved in a mRNA. See, e.g., Cech et al. U.S. Pat. No. 4,987,071; and Cech et al. U.S. Pat. No. 5,116,742. Alternatively, mRNA of the invention can be used to select a catalytic RNA having a specific ribonuclease activity from a pool of RNA molecules. See, e.g., Bartel et al., (1993) Science 261:1411-1418.

[0102] Alternatively, gene expression can be inhibited by targeting nucleotide sequences complementary to the regulatory region (e.g., promoter and/or enhancers) to form triple helical structures that prevent transcription of the gene in target cells. See generally, Helene. (1991) Anticancer Drug Des. 6: 569-84; Helene. et al (1992) Ann. N.Y. Acad. Sci. 660:27-36; and Malier (1992) Bioassays 14: 807-15.

[0103] In various embodiments, the nucleic acids of the invention can be modified at the base moiety, sugar moiety or phosphate backbone to improve, e.g., the stability, hybridization, or solubility of the molecule. For example, the deoxyribose phosphate backbone of the nucleic acids can be modified to generate peptide nucleic acids (see Hyrup et al. (1996) Bioorg Med Chem 4: 5-23). As used herein, the terms “peptide nucleic acids” or “PNAs” refer to nucleic acid mimics, e.g., DNA mimics, in which the deoxyiibose phosphate backbone is replaced by a pseudopeptide backbone and only the four natural nucleobases are retained. The neutral backbone of PNAs has been shown to allow for specific hybridization to DNA and RNA under conditions of low ionic strength. The synthesis of PNA oligomers can be performed using standard solid phase peptide synthesis protocols as described in Hyrup et al. (1996) above; Perry-O'Keefe et a. (1996) PNAS 93: 14670-675.

[0104] PNAs of the invention can be used in therapeutic and diagnostic applications. For example, PNAs can be used as antisense or antigene agents for sequence-specific modulation of gene expression by, e.g., inducing transcription or translation arrest or inhibiting replication. PNAs of the invention can also be used, e.g., in the analysis of single base pair mutations in a gene by, e.g., PNA directed PCR clamping; as artificial restriction enzymes when used in combination with other enzymes, e.g., S1 nucleases (Hyrup B. (1996) above); or as probes or primers for DNA sequence and hybridization (Hyrup et al. (1996), above; Perry-O'Keefe (1996), above).

[0105] In another embodiment, PNAs of the invention can be modified e.g., to enhance their stability or cellular uptake, by attaching lipophilic or other helper groups to PNA, by the formation of PNA-DNA chimeras, or by the use of liposomes or other techniques of drug delivery known in the art. For example, PNA-DNA chimeras can be generated that may combine the advantageous properties of PNA and DNA. Such chimeras allow DNA recognition enzymes, e.g., RNase H and DNA polymerases, to interact with the DNA portion while the PNA portion would provide high binding affinity and specificity. PNA-DNA chimeras can be linked using linkers of appropriate lengths selected in terms of base stacking, number of bonds between the nucleobases, and orientation (Hyrup (1996) above). The synthesis of PNA-DNA chimeras can be performed as described in Hyrup (1996) above and Finn et al. (1996) Nucl Acids Res24: 3357-63. For example, a DNA chain can be synthesized on a solid support using standard phosphoramidite coupling chemistry, and modified nucleoside analogs, e.g., 5′-(4-methoxytrityl)amino-5′-deoxy-thymidine phosphoramidite, can be used between the PNA and the 5′ end of DNA (Mag et al. (1989) Nucl Acid Res 17: 5973-88). PNA monomers are then coupled in a stepwise manner to produce a chimeric molecule with a 5′ PNA segment and a 3′ DNA segment (Finn et al. (1996) above). Alternatively, chimeric molecules can be synthesized with a 5′ DNA segment and a 3′ PNA segment. See, Petersen et al. (1975) Bioorg Med Chem Lett 5:1119-11124.

[0106] In other embodiments, the oligonucleotide may include other appended groups such as peptides (e.g., for targeting host cell receptors in vivo), or agents facilitating transport across the cell membrane (see, e.g., Letsinger et al., 1989, Proc. Natl. Acad. Sci. U.S.A. 86:6553-6556; Lemaitre et al., 1987, Proc. Natl. Acad. Sci. 84:648-652; PCT Publication No. W088/09810) or the blood-brain barrier (see, e.g., PCT Publication No. W089/10134). In addition, oligonucleotides can be modified with hybridization triggered cleavage agents (See, e.g., Krol et al., 1988, BioTechniques 6:958-976) or intercalating agents. (See, e.g., Zon, 1988, Phann. Res. 5: 539-549). To this end, the oligonucleotide may be conjugated to another molecule, e.g., a peptide, a hybridization triggered cross-linking agent, a transport agent, a hybridization-triggered cleavage agent, etc.

[0107] 4.5 Hosts

[0108] The present invention further provides host cells genetically engineered to contain the polynucleotides of the invention. For example, such host cells may contain nucleic acids of the invention introduced into the host cell using known transformation, transfection or infection methods. The present invention still further provides host cells genetically engineered to express the polynucleotides of the invention, wherein such polynucleotides are in operative association with a regulatory sequence heterologous to the host cell which drives expression of the polynucleotides in the cell.

[0109] Knowledge of nucleic acid sequences allows for modification of cells to permit, or increase, expression of endogenous polypeptide. Cells can be modified (e.g., by homologous recombination) to provide increased polypeptide expression by replacing, in whole or in part, the naturally occurring promoter with all or part of a heterologous promoter so that the cellsi express the polypeptide at higher levels. The heterologous promoter is inserted in such a manner that it is operatively linked to the encoding sequences. See, for example, PCT International Publication No. WO94/12650, PCT International Publication No. WO92/20808, and PCT International Publication No. WO9 1/09955. It is also contemplated that, in addition to heterologous promoter DNA, amplifiable marker DNA (e.g., ada, dhfr, and the multifunctional CAD gene which encodes carbamyl phosphate synthase, aspartate transcarbamylase, and dihydroorotase) and/or intron DNA may be inserted along with the heterologous promoter DNA. If linked to the coding sequence, amplification of the marker DNA by standard selection methods results in co-amplification of the desired protein coding sequences in the cells.

[0110] The host cell can be a higher eukaryotic host cell, such as a mammalian cell, a lower eukaryotic host cell, such as a yeast cell, or the host cell can be a prokaryotic cell, such as a bacterial cell. Introduction of the recombinant construct into the host cell can be effected by calcium phosphate transfection, DEAE, dextran mediated transfection, or electroporation (Davis, L. et al., Basic Methods in Molecular Biology (1986)). The host cells containing one of the polynucleotides of the invention, can be used in conventional manners to produce the gene product encoded by the isolated fragment (in the case of an ORF) or can be used to produce a heterologous protein under the control of the EMF.

[0111] Any host/vector system can be used to express one or more of the ORFs of the present invention. These include, but are not limited to, eukaryotic hosts such as HeLa cells, Cv-1 cell, COS cells, 293 cells, and Sf9 cells, as well as prokaryotic host such as E. coli and B. subtilis. The most preferred cells are those which do not normally express the particular polypeptide or protein or which expresses the polypeptide or protein at low natural level. Mature proteins can be expressed in mammalian cells, yeast, bacteria, or other cells under the control of appropriate promoters. Cell-free translation systems can also be employed to produce such proteins using RNAs derived from the DNA constructs of the present invention. Appropriate cloning and expression vectors for use with prokaryotic and eukaryotic hosts are described by Sambrook, et al., in Molecular Cloning: A Laboratory Manual, Second Edition, Cold Spring Harbor, N.Y. (1989), the disclosure of which is hereby incorporated by reference.

[0112] Various mammalian cell culture systems can also be employed to express recombinant protein. Examples of mammalian expression systems include the COS-7 lines of monkey kidney fibroblasts, described by Gluzman, Cell 23:175 (1981). Other cell lines capable of expressing a compatible vector are, for example, the C127, moikey COS cells, Chinese Hamster Ovary (CHO) cells, human kidney 293 cells, human epidermal A431 cells, human Colo205 cells, 3T3 cells, CV-1 cells, other transformed primate cell lines, normal diploid cells, cell strains derived from in vitro culture of primary tissue, primary explants, HeLa cells, mouse L cells, BHK, HL-60, U937, HaK or Jurkat cells. Mammalian expression vectors will comprise an origin of replication, a suitable promoter and also any necessary ribosome binding sites, polyadenylation site, splice donor and acceptor sites, transcriptional termination sequences, and 5′ flanking nontranscribed sequences. DNA sequences derived from the SV40 viral genome, for example, SV40 origin, early promoter, enhancer, splice, and polyadenylation sites may be used to provide the required nontranscribed genetic elements. Recombinant polypeptides and proteins produced in bacterial culture are usually isolated by initial extraction from cell pellets, followed by one or more salting-out, aqueous ion exchange or size exclusion chromatography steps. Protein refolding steps can be used, as necessary, in completing configuration of the mature protein. Finally, high performance liquid chromatography (HPLC) can be employed for final purification steps. Microbial cells employed in expression of proteins can be disrupted by any convenient method, including freeze-thaw cycling, sonication, mechanical disruption, or use of cell lysing agents.

[0113] Alternatively, it may be possible to produce the protein in lower eukaryotes such as yeast or insects or in prokaryotes such as bacteria. Potentially suitable yeast strains include Saccharomyces cerevisiae, Schizosaccharoniyces pombe, Kluyveronlyces strains, Candida, or any yeast strain capable of expressing heterologous proteins. Potentially suitable bacterial strains include Escherichia coli, Bacillus subtilis, Salmonella typhimurium, or any bacterial strain capable of expressing heterologous proteins. If the protein is made in yeast or bacteria, it may be necessary to modify the protein produced therein, for example by phosphorylation or glycosylation of the appropriate sites, in order to obtain the functional protein. Such covalent attachments may be accomplished using known chemical or enzymatic methods.

[0114] In another embodiment of the present invention, cells and tissues may be engineered to express an endogenous gene comprising the polynucleotides of the invention under the control of inducible regulatory elements, in which case the regulatory sequences of the endogenous gene may be replaced by homologous recombination. As described herein, gene targeting can be used to replace a gene's existing regulatory region with a regulatory sequence isolated from a different gene or a novel regulatory sequence synthesized by genetic engineering methods. Such regulatory sequences may be comprised of promoters, enhancers, scaffold-attachment regions, negative regulatory elements, transcriptional initiation sites, and regulatory protein binding sites or combinations of said sequences. Alternatively, sequences which affect the structure or stability of the RNA or protein produced may be replaced, removed, added, or otherwise modified by targeting. These sequence include polyadenylation signals, mRNA stability elements, splice sites, leader sequences for enhancing or modifying transport or secretion properties of the protein, or other sequences which alter or improve the function or stability of protein or RNA molecules.

[0115] The targeting event may be a simple insertion of the regulatory sequence, placing the gene under the control of the new regulatory sequence, e.g., inserting a new promoter or enhancer or both upstream of a gene. Alternatively, the targeting event may be a simple deletion of a regulatory element, such as the deletion of a tissue-specific negative regulatory element. Alternatively, the targeting event may replace an existing element; for example, a tissue-specific enhancer can be replaced by an enhancer that has broader or different cell-type specificity than the naturally occurring elements. Here, the naturally occurring sequences are deleted and new sequences are added. In all cases, the identification of the targeting event may be facilitated by the use of one or more selectable marker genes that are contiguous with the targeting DNA, allowing for the selection of cells in which the exogenous DNA has integrated into the host cell genome. The identification of the targeting event may also be facilitated by the use of one or more marker genes exhibiting the property of negative selection, such that the negatively selectable marker is linked to the exogenous DNA, but configured such that the negatively selectable marker flanks the targeting sequence, and such that a correct homologous recombination event with sequences in the host cell genome does not result in the stable integration of the negatively selectable marker. Markers useful for this purpose include the Herpes Simplex Virus thymidine kinase (TK) gene or the bacterial xanthine-guanine phosphoribosyl-transferase (gpt) gene.

[0116] The gene targeting or gene activation techniques which can be used in accordance with this aspect of the invention are more particularly described in U.S. Pat. No. 5,272,071 to Chappel; U.S. Pat. No. 5,578,461 to Sherwin et al.; International Application No. PCT/US92/09627 (WO93/09222) by Selden et al.; and International Application No. PCT/US90/06436 (WO91106667) by Skoultchi et al., each of which is incorporated by reference herein in its entirety.

[0117] 4.6 Polypeptides of the Invention

[0118] The isolated polypeptides of the invention include, but are not limited to, a polypeptide comprising: the amino acid sequences set forth as any one of SEQ ID NO: 125-248, or 331-412 or an amino acid sequence encoded by any one of the nucleotide sequences SEQ ID NO: 1-124, or 249-330 or the corresponding full length or mature protein. Polypeptides of the invention also include polypeptides preferably with biological or immunological activity that are encoded by: (a) a polynucleotide having any one of the nucleotide sequences set forth in SEQ ID NO: 1-124, or 249-330 or (b) polynucleotides encoding any one of the amino acid sequences set forth as SEQ ID NO: 125-248, or 331-412 or (c) polynucleotides that hybridize to the complement of the polynucleotides of either (a) or (b) under stringent hybridization conditions. The invention also provides biologically active or immunologically active variants of any of the amino acid sequences set forth as SEQ ID NO: 125-248, or 331-412 or the corresponding full length or mature protein; and “substantial equivalents” thereof (e.g., with at least about 65%, at least about 70%, at least about 75%, at least about 80%, at least about 85%, 86%, 87%, 88%, 89%, at least about 90%, 91%, 92%, 93%, 94%, typically at least about 95%, 96%, 97%, more typically at least about 98%, or most typically at least about 99% amino acid identity) that retain biological activity. Polypeptides encoded by allelic variants may have a similar, increased, or decreased activity compared to polypeptides comprising SEQ ID NO: 125-248, or 331-412.

[0119] Fragments of the proteins of the present invention which are capable of exhibiting biological activity are also encompassed by the present invention. Fragments of the protein may be in linear form or they may be cyclized using known methods, for example, as described in H. U. Saragovi, et al., Bio/Technology 10, 773-778 (1992) and in R. S. McDowell, et al., J. Amer. Chem. Soc. 114, 9245-9253 (1992), both of which are incorporated herein by reference. Such fragments may be fused to carrier molecules such as immunoglobulins for many purposes, including increasing the valency of protein binding sites. Fragments are also identified in Tables 3, 5, 6, and 8.

[0120] The present invention also provides both full-length and mature forms (for example, without a signal sequence or precursor sequence) of the disclosed proteins. The protein coding sequence is identified in the sequence listing by translation of the disclosed nucleotide sequences. The predicted signal sequence is set forth in Table 6. The mature form of such protein may be obtained and confirmed by expression of a full-length polynucleotide in a suitable mammalian cell or other host cell and sequencing of the cleaved product. One of skill in the art will recognize that the actual cleavage site may be different than that predicted in Table 6. The sequence of the mature form of the protein is also determinable from the amino acid sequence of the full-length form. Where proteins of the present invention are membrane bound, soluble forms of the proteins are also provided. In such forms, part or all of the regions causing the proteins to be membrane bound are deleted so that the proteins are fully secreted from the cell in which they are expressed.

[0121] Protein compositions of the present invention may further comprise an acceptable carrier, such as a hydrophilic, e.g., pharmaceutically acceptable, carrier.

[0122] The present invention further provides isolated polypeptides encoded by the nucleic acid fragments of the present invention or by degenerate variants of the nucleic acid fragments of the present invention. By “degenerate variant” is intended nucleotide fragments which differ from a nucleic acid fragment of the present invention (e.g., an ORF) by nucleotide sequence but, due to the degeneracy of the genetic code, encode an identical polypeptide sequence. Preferred nucleic acid fragments of the present invention are the ORFs that encode proteins.

[0123] A variety of methodologies known in the art can be utilized to obtain any one of the isolated polypeptides or proteins of the present invention. At the simplest level, the amino acid sequence can be synthesized using commercially available peptide synthesizers. The synthetically-constructed protein sequences, by virtue of sharing primary, secondary or tertiary structural and/or conformational characteristics with proteins may possess biological properties in common therewith, including protein activity. This technique is particularly useful in producing small peptides and fragments of larger polypeptides. Fragments are useful, for example, in generating antibodies against the native polypeptide. Thus, they may be employed as biologically active or immunological substitutes for natural, purified proteins in screening of therapeutic compounds and in immunological processes for the development of antibodies.

[0124] The polypeptides and proteins of the present invention can alternatively be purified from cells which have been altered to express the desired polypeptide or protein. As used herein, a cell is said to be altered to express a desired polypeptide or protein when the cell, through genetic manipulation, is made to produce a polypeptide or protein which it normally does not produce or which the cell normally produces at a lower level. One skilled in the art can readily adapt procedures for introducing and expressing either recombinant or synthetic sequences into eukaryotic or prokaryotic cells in order to generate a cell which produces one of the polypeptides or proteins of the present invention.

[0125] The invention also relates to methods for producing a polypeptide comprising growing a culture of host cells of the invention in a suitable culture medium, and purifying the protein from the cells or the culture in which the cells are grown. For example, the methods of the invention include a process for producing a polypeptide in which a host cell containing a suitable expression vector that includes a polynucleotide of the invention is cultured under conditions that allow expression of the encoded polypeptide. The polypeptide can be recovered from the culture, conveniently firom the culture medium, or from a lysate prepared from the host cells and firther purified. Preferred embodiments include those in which the protein produced by such process is a full length or mature form of the protein.

[0126] In an alternative method, the polypeptide or protein is purified from bacterial cells which naturally produce the polypeptide or protein. One skilled in the art can readily follow known methods for isolating polypeptides and proteins in order to obtain one of the isolated polypeptides or proteins of the present invention. These include, but are not limited to, immunochromatography, HPLC, size-exclusion chromatography, ion-exchange chromatography, and immuno-affinity chromatography. See, e.g., Scopes, Protein Purification: Principles and Practice, Springer-Verlag (1994); Sambrook, et al., in Molecular Cloning: A Laboratory Manual; Ausubel et al., Current Protocols in Molecular Biology. Polypeptide fragments that retain biological/immunological activity include fragments comprising greater than about 100 amino acids, or greater than about 200 amino acids, and fragments that encode specific protein domains.

[0127] The purified polypeptides can be used in in vitro binding assays which are well known in the art to identify molecules which bind to the polypeptides. These molecules include but are not limited to, for e.g., small molecules, molecules from combinatorial libraries, antibodies or other proteins. The molecules identified in the binding assay are then tested for antagonist or agonist activity in in vivo tissue culture or animal models that are well known in the art. In brief, the molecules are titrated into a plurality of cell cultures or animals and then tested for either cell/animal death or prolonged survival of the animal/cells.

[0128] In addition, the peptides of the invention or molecules capable of binding to the peptides may be complexed with toxins, e.g., ricin or cholera, or with other compounds that are toxic to cells. The toxin-binding molecule complex is then targeted to a tumor or other cell by the specificity of the binding molecule for SEQ ID NO: 125-248, or 331- 412.

[0129] The protein of the invention may also be expressed as a product of transgenic animals, e.g., as a component of the milk of transgenic cows, goats, pigs, or sheep which are characterized by somatic or germ cells containing a nucleotide sequence encoding the protein.

[0130] The proteins provided herein also include proteins characterized by amino acid sequences similar to those of purified proteins but into which modification are naturally provided or deliberately engineered. For example, modifications, in the peptide or DNA sequence, can be made by those skilled in the art using known techniques. Modifications of interest in the protein sequences may include the alteration, substitution, replacement, insertion or deletion of a selected amino acid residue in the coding sequence. For example, one or more of the cysteine residues may be deleted or replaced with another amino acid to alter the conformation of the molecule. Techniques for such alteration, substitution, replacement, insertion or deletion are well known to those skilled in the art (see, e.g., U.S. Pat. No. 4,518,584). Preferably, such alteration, substitution, replacement, insertion or deletion retains the desired activity of the protein. Regions of the protein that are important for the protein function can be determined by various methods known in the art including the alanine-scanning method which involved systematic substitution of single or strings of amino acids with alailne, followed by testing the resulting alanine-containing variant for biological activity. This type of analysis determines the importance of the substituted amino acid(s) in biological activity. Regions of the protein that are important for protein function may be determined by the eMATRIX program.

[0131] Other fragments and derivatives of the sequences of proteins which would be expected to retain protein activity in whole or in part and are useful for screening or other immunological methodologies may also be easily made by those skilled in the art given the disclosures herein. Such modifications are encompassed by the present invention.

[0132] The protein may also be produced by operably linking the isolated polynucleotide Aof the invention to suitable control sequences in one or more insect expression vectors, and employing an insect expression system. Materials and methods for baculovirus/insect cell expression systems are commercially available in kit form from, e.g., Invitrogen, San Diego, Calif., U.S.A. (the MaxBat™ kit), and such methods are well known in the art, as described in Summers and Smith, Texas Agnicultural Experiment Station Bulletin No. 1555 (1987), incorporated herein by reference. As used herein, an insect cell capable of expressing a polynucleotide of the present invention is “transformed.”

[0133] The protein of the invention may be prepared by culturing transformed host cells under culture conditions suitable to express the recombinant protein. The resulting expressed protein may then be purified from such culture (i.e., from culture mediuni or cell extracts) using known purification processes, such as gel filtration and ion exchange chromatography. The purification of the protein may also include an affinity column containing agents which will bind to the protein; one or more column steps over such affinity resins as concanavalin A-agarose, heparin-toyopearl™ or Cibacrom blue 3GA Sepharose™; one or more steps involving hydrophobic interaction chromatography using such resins as phenyl ether, butyl ether, or propyl ether; or inuunoaffility chromatography.

[0134] Alternatively, the protein of the invention may also be expressed in a form which will facilitate purification. For example, it may be expressed as a fusion protein, such as those of maltose binding protein (MBP), glutathione-S-transferase (GST) or thioredoxin (TRX), or as a His tag. Kits for expression and purification of such fusion proteins are commercially available from New England BioLab (Beverly, Mass.), Pharnacia (Piscataway, N.J.) and Invitrogen, respectively. The protein can also be tagged with an epitope and subsequently purified by using a specific antibody directed to such epitope. One such epitope (“FLAG®”) is commercially available from Kodak (New Haven, Conn.).

[0135] Finally, one or more reverse-phase high performance liquid chromatography (RP-HPLC) steps employing hydrophobic RP-HPLC media, e.g., silica gel having pendant methyl or other aliphatic groups, can be employed to further purify the protein. Some or all of the foregoing purification steps, in various combinations, can also be employed to provide a substantially homogeneous isolated recombinant protein. The protein thus purified is substantially free of other mammalian proteins and is defined in accordance with the present invention as an “isolated protein.”

[0136] The polypeptides of the invention include analogs (variants). This embraces fragments, as well as peptides in which one or more amino acids has been deleted, inserted, or substituted. Also, analogs of the polypeptides of the invention embrace fusions of the polypeptides or modifications of the polypeptides of the invention, wherein the polypeptide or analog is fused to another moiety or moieties, e.g., targeting moiety or another therapeutic agent. Such analogs may exhibit improved properties such as activity and/or stability. Examples of moieties which may be fused to the polypeptide or an analog include, for example, targeting moieties which provide for the delivery of polypeptide to pancreatic cells, e.g., antibodies to pancreatic cells, antibodies to immune cells such as T-cells, monocytes, dendritic cells, granulocytes, etc., as well as receptor and ligands expressed on pancreatic or immune cells. Other moieties which may be fused to the polypeptide include therapeutic agents which are used for treatment, for example, immunosuppressive drugs such as cyclosporin, SK506, azathioprine, CD3 antibodies and steroids. Also, polypeptides may be fused to immune modulators, and other cytokines such as alpha or beta interferon.

[0137] 4.6.1 Determining Polypeptide and Polynucleotide Identity and Similarity

[0138] Preferred identity and/or similarity are designed to give the largest match between the sequences tested. Methods to determine identity and similarity are codified in computer programs including, but are not limited to, the GCG program package, including GAP (Devereux, J., et al., Nucleic Acids Research 12(1):387 (1984); Genetics Computer Group, University of Wisconsin, Madison, Wis.), BLASTP, BLASTN, BLASTX, FASTA (Altschul, S.F. et al., J. Molec. Biol. 215:403-410 (1990), PSI-BLAST (Altschul S. F. et al., Nucleic Acids Res. vol. 25, pp. 3389-3402, herein incorporated by reference), eMatrix software (Wu et al., J. Comp. Biol., Vol. 6, pp. 219-235 (1999), herein incorporated by reference), eMotif software (Nevill-Manning et al, ISMB-97, Vol. 4, pp. 202-209, herein incorporated by reference), Pfam software (Sonnhammer et al., Nucleic Acids Res., Vol. 26(1), pp. 320-322 (1998), herein incorporated by reference) and the Kyte-Doolittle hydrophobocity prediction algorithm (J. Mol Biol, 157, pp. 105-31 (1982), incorporated herein by reference). polypeptide sequences were examined by a proprietary algorithm, SeqLoc that separates the proteins into three sets of locales: intracellular, membrane, or secreted. This prediction is based upon three characteristics of each polypeptide, including percentage of cysteine residues, Kyte-Doolittle scores for the first 20 amino acids of each protein, and Kyte-Doolittle scores to calculate the longest hydrophobic stretch of the said protein. Values of predicted proteins are compared against the values from a set of 592 proteins of known cellular localization from the Swissprot database (http://www.exnasy.ch/sprot). Predictions are based upon the maximum likelihood estimation.

[0139] The BLAST programs are publicly available from the National Center for Biotechnology Information (NCBI) and other sources (BLAST Manual, Altschul, S., et al. NCBI NLM NIH Bethesda, Md. 20894; Altschul, S., et al., J. Mol. Biol. 215:403-410 (1990).

[0140] 4.7 Chimeric and Fusion Proteins

[0141] The invention also provides chimeric or fusion proteins. As used herein, a “chimeric protein” or “fusion protein” comprises a polypeptide of the invention operatively linked to another polypeptide. Within a fusion protein the polypeptide according to the invention can correspond to all or a portion of a protein according to the invention. In one embodiment, a fusion protein comprises at least one biologically active portion of a protein according to the invention. In another embodiment, a fusion protein comprises at least two biologically active portions of a protein according to the invention. Within the fusion protein, the term “operatively linked” is intended to indicate that the polypeptide according to the invention and the other polypeptide are fused in-frame to each other. The polypeptide can be fused to the N-terminus or C-terminus, or to the middle.

[0142] For example, in one embodiment a fusion protein comprises a polypeptide according to the invention operably linked to the extracellular domain of a second protein.

[0143] In another embodiment, the fusion protein is a GST-fusion protein in which the polypeptide sequences of the invention are fused to the C-terminus of the GST (i.e., glutathione S-transferase) sequences.

[0144] In another embodiment, the fusion protein is an immunoglobulin fusion protein in which the polypeptide sequences according to the invention comprise one or more domains fused to sequences derived from a member of the immunoglobulin protein farnily. The immunoglobulin fusion proteins of the invention can be incorporated into pharmaceutical compositions and administered to a subject to inhibit an interaction between a ligand and a protein of the invention on the surface of a cell, to thereby suppress signal transduction in vivo. The immunoglobulin fusion proteins can be used to affect the bioavailability of a cognate ligand. Inhibition of the ligand/protein interaction may be useful therapeutically for both the treatment of proliferative and differentiative disorders, e.g., cancer as well as modulating (e.g., promoting or inhibiting) cell survival. Moreover, the immunoglobulin fusion proteins of the invention can be used as immunogens to produce antibodies in a subject, to purify ligands, and in screening assays to identify molecules that inhibit the interaction of a polypeptide of the invention with a ligand.

[0145] A chimeric or fusion protein of the invention can be produced by standard recombinant DNA techniques. For example, DNA fragments coding for the different polypeptide sequences are ligated together in-frame in accordance with conventional techniques, e.g., by employing blunt-ended or stagger-ended termini for ligation, restriction enzyme digestion to provide for appropriate termini, filling-in of cohesive ends as appropriate, alkaline phosphatase treatment to avoid undesirable joining, and enzymatic ligation. In another embodiment, the fusion gene can be synthesized by conventional techniques including automated DNA synthesizers. Alternatively, PCR amplification of gene fragments can be carried out using anchor primers that give rise to complementary overhangs between two consecutive gene fragments that can subsequently be annealed and reamplified to generate a chimeric gene sequence (see, for example, Ausubel et al. (eds.) CURRENT PROTOCOLS IN MOLECULAR BIOLOGY, John Wiley & Sons, 1992). Moreover, many expression vectors are commercially available that already encode a fusion moiety (e.g., a GST polypeptide). A nucleic acid encoding a polypeptide of the invention can be cloned into such an expression vector such that the fusion moiety is linked in-frame to the protein of the invention.

[0146] 4.8 Gene Therapy

[0147] Mutations in the polynucleotides of the invention gene may result in loss of normal function of the encoded protein. The invention thus provides gene therapy to restore normal activity of the polypeptides of the invention; or to treat disease states involving polypeptides of the invention. Delivery of a functional gene encoding polypeptides of the invention to appropriate cells is effected ex vivo, in situ, or in vivo by use of vectors, and more particularly viral vectors (e.g., adenovirus, adeno-associated virus, or a retrovirus), or ex vivo by use of physical DNA transfer methods (e.g., liposomes or chemical treatments). See, for example, Anderson, Nature, supplement to vol. 392, no. 6679, pp.25-20 (1998). For additional reviews of gene therapy technology see Friedmann, Science, 244: 1275-1281 (1989); Verma, Scientific American: 68-84 (1990); and Miller, Nature, 357: 455-460 (1992). Introduction of any one of the nucleotides of the present invention or a gene encoding the polypeptides of the present invention can also be accomplished with extrachromosomal substrates (transient expression) or artificial chromosomes (stable expression). Qells may also be cultured ex vivo in the presence of proteins of the present invention in order to proliferate or to produce a desired effect on or activity in such cells. Treated cells can then be introduced in vivo for therapeutic purposes. Alternatively, it is contemplated that in other human disease states, preventing the expression of or inhibiting the activity of polypeptides of the invention will be useful in treating the disease states. It is contemplated that antisense therapy or gene therapy could be applied to negatively regulate the expression of polypeptides of the invention.

[0148] Other methods inhibiting expression of a protein include the introduction of antisense molecules to the nucleic acids of the present invention, their complements, or their translated RNA sequences, by methods known in the art. Further, the polypeptides of the present invention can be inhibited by using targeted deletion methods, or the insertion of a negative regulatory element such as a silencer, which is tissue specific.

[0149] The present invention still further provides cells genetically engineered in vivo to express the polynucleotides of the invention, wherein such polynucleotides are in operative association with a regulatory sequence heterologous to the host cell which drives expression of the polynucleotides in the cell. These methods can be used to increase or decrease the expression of the polynucleotides of the present invention.

[0150] Knowledge of DNA sequences provided by the invention allows for modification of cells to permit, increase, or decrease, expression of endogenous polypeptide. Cells can be modified (e.g., by homologous recombination) to provide increased polypeptide expression by replacing, in whole or in part, the naturally occurring promoter with all or part of a heterologous promoter so that the cells express the protein at higher levels. The heterologous promoter is inserted in such a manner that it is operatively linked to the desired protein encoding sequences. See, for example, PCT International Publication No. WO 94/12650, PCT International Publication No. WO 92/20808, and PCT International Publication No. WO 91/09955. It is also contemplated that, in addition to heterologous promoter DNA, amplifiable marker DNA (e.g., ada, dhfr, and the multifunctional CAD gene which encodes carbamyl phosphate synthase, aspartate transcarbamylase, and dihydroorotase) and/or intron DNA may be inserted along with the heterologous promoter DNA. If linked to the desired protein coding sequence, amplification of the marker DNA by standard selection methods results in co-amplification of the desired protein coding sequences in the cells.

[0151] In another embodiment of the present invention, cells and tissues may be engineered to express an endogenous gene comprising the polynucleotides of the invention under the control of inducible regulatory elements, in which case the regulatory sequences of the endogenous gene may be replaced by homologous recombination. As described herein, gene targeting can be used to replace a gene's existing regulatory region with a regulatory sequence isolated from a different gene or a novel regulatory sequence synthesized by genetic engineering methods. Such regulatory sequences may be comprised of promoters, enhancers, scaffold-attachment regions, negative regulatory elements, transcriptional initiation sites, regulatory protein binding sites or combinations of said sequences. Alternatively, sequences which affect the structure or stability of the RNA or protein produced maybe replaced, removed, added, or otherwise modified by targeting. These sequences include polyadenylation signals, mRNA stability elements, splice sites, leader sequences for enhancing or modifying transport or secretion properties of the protein, or other sequences which alter or improve the function or stability of protein or RNA molecules.

[0152] The targeting event may be a simple insertion of the regulatory sequence, placing the gene under the control of the new regulatory sequence, e.g., inserting a new promoter or enhancer or both upstream of a gene. Alternatively, the targeting event may be a simple deletion of a regulatory element, such as the deletion of a tissue-specific negative regulatory element. Alternatively, the targeting event may replace an existing element; for example, a tissue-specific enhancer can be replaced by an enhancer that has broader or different cell-type specificity than the naturally occurring elements. Here, the naturally occurring sequences are deleted and new sequences are added. In all cases, the identification of the targeting event may be facilitated by the use of one or more selectable marker genes that are contiguous with the targeting DNA, allowing for the selection of cells in which the exogenous DNA has integrated into the cell genome. The identification of the targeting event may also be facilitated by the use of one or more marker genes exhibiting the property of negative selection, such that the negatively selectable marker is linked to the exogenous DNA, but configured such that the negatively selectable marker flanks the targeting sequence, and such that a correct homologous recombination event with sequences in the host cell genome does not result in the stable integration of the negatively selectable marker.

[0153] Markers useful for this purpose include the Herpes Simplex Virus thymidine kinase (TK) gene or the bacterial xanthine-guanine phosphoribosyl-transferase (gpt) gene.

[0154] The gene targeting or gene activation techniques which can be used in accordance with this aspect of the invention are more particularly described in U.S. Pat. No. 5,272,071 to Chappel; U.S. Pat. No. 5,578,461 to Sherwin et al.; International Application No. PCT/US92/09627 (WO93/09222) by Selden et al.; and International Application No. PCT/US90/06436 (WO91/06667) by Skoultchi et al., each of which is incorporated by reference herein in its entirety.

[0155] 4.9 Transgenic Animals

[0156] In preferred methods to determine biological functions of the polypeptides of the invention in vivo, one or more genes provided by the invention are either over expressed or inactivated in the germ line of animals using homologous recombination [Capecchi, Science 244:1288-1292 (1989)]. Animals in which the gene is over expressed, under the regulatory control of exogenous or endogenous promoter elements, are known as transgenic animals. Animals in which an endogenous gene has been inactivated by homologous recombination are referred to as “knockout” animals. Knockout animals, preferably non-human marnmals, can be prepared as described in U.S. Pat. No. 5,557,032, incorporated herein by reference. Transgenic animals are useful to determine the roles polypeptides of the invention play in biological processes, and preferably in disease states. Transgenic animals are useful as model systems to identify compounds that modulate lipid metabolism. Transgenic animals, preferably non-human mammals, are produced using methods as described in U.S. Patent No 5,489,743 and PCT Publication No. WO94/28122, incorporated herein by reference.

[0157] Transgenic animals can be prepared wherein all or part of a promoter of the polynucleotides of the invention is either activated or inactivated to alter the level of expression of the polypeptides of the invention. Inactivation can be carried out using homologous recombination methods described above. Activation can be achieved by supplementing or even replacing the homologous promoter to provide for increased protein expression. The homologous promoter can be supplemented by insertion of one or more heterologous enhancer elements known to confer promoter activation in a particular tissue.

[0158] The polynucleotides of the present invention also make possible the development, through, e.g., homologous recombination or knock out strategies, of animals that fail to express polypeptides of the invention or that express a variant polypeptide. Such animals are useful as models for studying the in vivo activities of polypeptide as well as for studying modulators of the polypeptides of the invention.

[0159] In preferred methods to determine biological functions of the polypeptides of the invention in vivo, one or more genes provided by the invention are either over expressed or inactivated in the germ line of animals using homologous recombination [Capecchi, Science 244:1288-1292 (1989)]. Animals in which the gene is over expressed, under the regulatory control of exogenous or endogenous promoter elements, are known as transgenic animals. Animals in which an endogenous gene has been inactivated by homologous recombination are referred to as “knockout” animals. Knockout animals, preferably non-human mammals, can be prepared as described in U.S. Pat. No. 5,557,032, incorporated herein by reference. Transgenic animals are useful to determine the roles polypeptides of the invention play in biological processes, and preferably in disease states. Transgenic animals are useful as model systems to identify compounds that modulate lipid metabolism. Transgenic animals, preferably non-human marnnals, are produced using methods as described in U.S. Pat. No. 5,489,743 and PCT Publication No. WO94/28 122, incorporated herein by reference.

[0160] Transgenic animals can be prepared wherein all or part of the polynucleotides of the invention promoter is either activated or inactivated to alter the level of expression of the polypeptides of the invention. Inactivation can be carried out using homologous recombination methods described above. Activation can be achieved by supplementing or even replacing the homologous promoter to provide for increased protein expression. The homologous promoter can be supplemented by insertion of one or more heterologous enhancer elements known to confer promoter activation in a particular tissue.

[0161] 4.10 Uses and Biological Activity

[0162] The polynucleotides and proteins of the present invention are expected to exhibit one or more of the uses or biological activities (including those associated with assays cited herein) identified herein. Uses or activities described for proteins of the present invention may be provided by administration or use of such proteins or of polynucleotides encoding such proteins (such as, for example, in gene therapies or vectors suitable for introduction of DNA). The mechanism underlying the particular condition or pathology will dictate whether the polypeptides of the invention, the polynucleotides of the invention or modulators (activators or inhibitors) thereof would be beneficial to the subject in need of treatment. Thus, “therapeutic compositions of the invention” include compositions comprising isolated polynucleotides (including recombinant DNA molecules, cloned genes and degenerate variants thereof) or polypeptides of the invention (including full length protein, mature protein and truncations or domains thereof), or compounds and other substances that modulate the im overall activity of the target gene products, either at the level of target gene/protein expression or target protein activity. Such modulators include polypeptides, analogs, (variants), including fragments and fusion proteins, antibodies and other binding proteins; chemical compounds that directly or indirectly activate or inhibit the polypeptides of the invention (identified, e.g., via drug screening assays as described herein); antisense polynucleotides and polynucleotides suitable for triple helix formation; and in particular antibodies or other binding partners that specifically recognize one or more epitopes of the polypeptides of the invention.

[0163] The polypeptides of the present invention may likewise be involved in cellular activation or in one of the other physiological pathways described herein.

[0164] 4.10.1 Research Uses and Utilities

[0165] The polynucleotides provided by the present invention can be used by the research community for various purposes. The polynucleotides can be used to express recombinant protein for analysis, characterization or therapeutic use; as markers for tissues in which the corresponding protein is preferentially expressed (either constitutively or at a particular stage of tissue differentiation or development or in disease states); as molecular weight markers on gels; as chromosome markers or tags (when labeled) to identify chromosomes or to map related gene positions; to compare with endogenous DNA sequences in patients to identify potential genetic disorders; as probes to hybridize and thus discover novel, related DNA sequences; as a source of information to derive PCR primers for genetic fingerprinting; as a probe to “subtract-out” known sequences in the process of discovering other novel polynucleotides; for selecting and making oligomers for attachment to a “gene chip” or other support, including for examination of expression patterns; to raise anti-protein antibodies using DNA immunization techniques; and as an antigen to raise anti-DNA antibodies or elicit another immune response. Where the polynucleotide encodes a protein which binds or potentially binds to another protein (such as, for example, in a receptor-ligand interaction), the polynucleotide can also be used in interaction trap assays (such as, for example, that described in Gyuris et al., Cell 75:791-803 (1993)) to identify polynucleotides encoding the other protein with which binding occurs or to identify inhibitors of the binding interaction.

[0166] The polypeptides provided by the present invention can similarly be used in assays to determine biological activity, including in a panel of multiple proteins for high-throughput screening; to raise antibodies or to elicit another immune response; as a reagent (including the labeled reagent) in assays designed to quantitatively determine levels of the protein (or its receptor) in biological fluids; as markers for tissues in which the corresponding polypeptide is preferentially expressed (either constitutively or at a particular stage of tissue differentiation or development or in a disease state); and, of course, to isolate correlative receptors or ligands. Proteins involved in these binding interactions can also be used to screen for peptide or small molecule inhibitors or agonists of the binding interaction.

[0167] Any or all of these research utilities are capable of being developed into reagent grade or kdt format for commercialization as research products.

[0168] Methods for performing the uses listed above are well known to those skilled in the art. References disclosing such methods include without limitation “Molecular Cloning; A Laboratory Manual”, 2d ed., Cold Spring Harbor Laboratory Press, Sambrook, J., E. F. Fritsch and T. Maniatis eds., 1989, and “Methods in Enzymology: Guide to Molecular Cloning Techniques”, Academic Press, Berger, S. L. and A. R. Kimmel eds., 1987.

[0169] 4.10.2 Nutritional Uses

[0170] Polynucleotides and polypeptides of the present invention can also be used as nutritional sources or supplements. Such uses include without limitation use as a protein or amino acid supplement, use as a carbon source, use as a nitrogen source and use as a source of carbohydrate. In such cases the polypeptide or polynucleotide of the invention can be added to the feed of a particular organism or can be administered as a separate solid or liquid preparation, such as in the form of powder, pills, solutions, suspensions or capsules. In the case of microorganisms, the polypeptide or polynucleotide of the invention can be added to the medium in or on which the microorganism is cultured.

[0171] 4.10.3 Cytokine and Cell Proliferation/Differentiation Activity

[0172] A polypeptide of the present invention may exhibit activity relating to cytokine, cell proliferation (either inducing or inhibiting) or cell differentiation (either inducing or inhibiting) activity or may induce production of other cytokines in certain cell populations. A polynucleotide of the invention can encode a polypeptide exhibiting such attributes. Many protein factors discovered to date, including all known cytokines, have exhibited activity in one or more factor-dependent cell proliferation assays, and hence the assays serve as a convenient confirmation of cytokine activity. The activity of therapeutic compositions of the present invention is evidenced by any one of a number of routine factor dependent cell proliferation assays for cell lines including, without limitation, 32D, DA2, DA1G, T10, B9, B9/11, BaF3, MC9/G, M+preB M+), 2E8, RB5, DA1, 123, T1165, HT2, CTLL2, TF-1, Mo7e, CMK, HUVEC, and Caco. Therapeutic compositions of the invention can be used in the following:

[0173] Assays for T-cell or thymocyte proliferation include without limitation those described in: Current Protocols in Immunology, Ed by J. E. Coligan, A. M. Kruisbeek, D. H. Margulies, E. M. Shevach, W. Strober, Pub. Greene Publishing Associates and Wiley-Interscience (Chapter 3, In Vitro assays for Mouse Lymphocyte Function 3.1-3.19; Chapter 7, Immunologic studies in Humans); Takai et al., J. Immunol. 137:3494-3500, 1986; Bertagnolli et al., J. Immunol. 145:1706-1712, 1990; Bertagnolli et al., Cellular Immunology 133:327-341, 1991; Bertagnolli, et al., I. Immunol. 149:3778-3783, 1992; Bowman et al., I. hmnunol. 152:1756-1761, 1994.

[0174] Assays for cytokine production and/or proliferation of spleen cells, lymph node cells or thymocytes include, without limitation, those described in: Polyclonal T cell stimulation, Kruisbeek, A. M. and Shevach, E. M. In Current Protocols in Immunology. J. E. e.a. Coligan eds. Vol 1 pp. 3.12.1-3.12.14, John Wiley and Sons, Toronto. 1994; and Measurement of mouse and human interleukin-y, Schreiber, R. D. In Current Protocols in Immunology. J. E. e.a. Coligan eds. Vol 1 pp. 6.8.1-6.8.8, John Wiley and Sons, Toronto. 1994.

[0175] Assays for proliferation and differentiation of hematopoietic and lymphopoietic cells include, without limitation, those described in: Measurement of Human and Murine Interleukin 2 and Interleukin 4, Boffomly, K., Davis, L. S. and Lipsky, P. E. In Current Protocols in Immunology. J. E. e.a. Coligan eds. Vol 1 pp. 6.3.1-6.3.12, John Wiley and Sons, Toronto. 1991; deVries et al., J. Exp. Med. 173:1205-1211, 1991; Moreau et al., Nature 336:690-692, 1988; Greenberger et al., Proc. Natl. Acad. Sci. U.S.A. 80:2931-2938, 1983; Measurement of mouse and human interleukin 6—Nordan, R. In Current Protocols in Immunology. J. E. Coligan eds. Vol 1 pp. 6.6.1-6.6.5, John Wiley and Sons, Toronto. 1991; Smith et al., Proc. Natl. Aced. Sci. U.S.A. 83:1857-1861, 1986; Measurement of human Interleukin 11 —Bennett, F., Giannotti, J., Clark, S. C. and Turner, K. J. In Current Protocols in Immunology. J. E. Coligan eds. Vol 1 pp. 6.15.1 John Wiley and Sons, Toronto. 1991; Measurement of mouse and human Interleukin 9—Ciarletta, A., Giannotti, J., Clark, S. C. and Turner, K. J. In Current Protocols in Immunology. J. E. Coligan eds. Vol 1 pp. 6.13.1, John Wiley and Sons, Toronto. 1991.

[0176] Assays for T-cell clone responses to antigens (which will identify, among others, proteins that affect APC-T cell interactions as well as direct T-cell effects by measuring proliferation and cytokine production) include, without limitation, those described in: Current Protocols in Immunology, Ed by J. E. Coligan, A. M. Kruisbeek, D. H. Margulies, E. M.,Shevach, W Strober, Pub. Greene Publishing Associates and Wiley-Interscience (Chapter 3, In Vitro assays for Mouse Lymphocyte Function; Chapter 6, Cytokines and their cellular receptors; Chapter 7, Immunologic studies in Humans); Weinberger et al., Proc. Natl. Acad. Sci. USA 77:6091-6095, 1980; Weinberger et al., Eur. J. Immun. 11:405-411, 1981; Takai et al., J. Immunol. 137:3494-3500, 1986; Takai et al., J. nnmunol. 140:508-512, 1988.

[0177] 4.10.4 Stem Cell Growth Factor Activity

[0178] A polypeptide of the present invention may exhibit stem cell growth factor activity and be involved in the proliferation, differentiation and survival of pluripotent and totipotent stem cells including primordial germ cells, embryonic stem cells, hematopoictic stem cells and/or germ line stem cells. Administration of the polypeptide of the invention to stem cells in vivo or ex vivo is expected to maintain and expand cell populations in a totipotential or pluripotential state which would be useful for re-engineering damaged or diseased tissues, transplantation, manufacture of bio-pharmaceuticals and the development of bio-sensors. The ability to produce large quantities of human cells has important working applications for the production of human proteins which currently must be obtained from non-human sources or donors, implantation of cells to treat diseases such as Parkinson's, Alzheimer's and other neurodegenerative diseases; tissues for grafting such as bone marrow, skin, cartilage, tendons, bone, muscle (including cardiac muscle), blood vessels, cornea, neural cells, gastrointestinal cells and others; and organs for transplantation such as kidney, liver, pancreas (including islet cells), heart and lung.

[0179] It is contemplated that multiple different exogenous growth factors and/or cytokines may be administered in combination with the polypeptide of the invention to achieve the desired effect, including any of the growth factors listed herein, other stem cell maintenance factors, and specifically including stem cell factor (SCF), leukemia inhibitory factor (LIF), Flt-3 ligand (Flt-3L), any of the interleukins, recombinant soluble IL-6 receptor fused to IL-6, macrophage inflammatory protein 1-alpha (MIP-1-alpha), G-CSF, GM-CSF, thrombopoietin (TPO), platelet factor 4 (PF-4), platelet-derived growth factor (PDGF), neural growth factors and basic fibroblast growth factor (bFGF).

[0180] Since totipotent stem cells can give rise to virtually any mature cell type, expansion of these cells in culture will facilitate the production of large quantities of mature cells. Techniques for culturing stem cells are known in the art and administration of polypeptides of the invention, optionally with other growth factors and/or cytokines, is expected to enhance the survival and proliferation of the stem cell populations. This can be accomplished by direct administration of the polypeptide of the invention to the culture medium. Alternatively, stroma cells transfected with a polynucleotide that encodes for the polypeptide of the invention can be used as a feeder layer for the stem cell populations in culture or in vivo. Stromal support cells for feeder layers may include embryonic bone marrow fibroblasts, bone marrow stromal cells, fetal liver cells, or cultured embryonic fibroblasts (see U.S. Pat. No. 5,690,926).

[0181] Stem cells themselves can be transfected with a polynucleotide of the invention to induce autocrine expression of the polypeptide of the invention. This will allow for generation of undifferentiated totipotential/pluripotential stem cell lines that are useful as is or that can then be differentiated into the desired mature cell types. These stable cell lines can also serve as a source of undifferentiated totipotential/pluripotential mRNA to create cDNA libraries and templates for polymerase chain reaction experiments. These studies would allow for the isolation and identification of differentially expressed genes in stem cell populations that regulate stem cell proliferation and/or maintenance.

[0182] Expansion and maintenance of totipotent stem cell populations will be useful in the treatment of many pathological conditions. For example, polypeptides of the present invention may be used to manipulate stem cells in culture to give rise to neuroepithelial cells that can be used to augment or replace cells damaged by illness, autoimmune disease, accidental damage or genetic disorders. The polypeptide of the invention may be useful for inducing the proliferation of neural cells and for the regeneration of nerve and brain tissue, i.e. for the treatment of central and peripheral nervous system diseases and neuropathies, as well as mechanical and traumatic disorders which involve degeneration, death or trauma to neural cells or nerve tissue. In addition, the expanded stem cell populations can also be genetically altered for gene therapy purposes and to decrease host rejection of replacement tissues after grafting or implantation.

[0183] Expression of the polypeptide of the invention and its effect on stem cells can also be manipulated to achieve controlled differentiation of the stem cells into more differentiated cell types. A broadly applicable method of obtaining pure populations of a specific differentiated cell type from undifferentiated stem cell populations involves the use of a cell-type specific promoter driving a selectable marker. The selectable marker allows only cells of the desired type to survive. For example, stem cells can be induced to differentiate into cardiomyocytes (Wobus et al., Differentiation, 48: 173-182, (1991); Klug et al., J. Clin. Invest., 98(1): 216-224, (1998)) or skeletal muscle cells (Browder, L. W. In: Principles of Tissue Engineering eds. Lanza et al., Academic Press (1997)). Alternatively, directed differentiation of stem cells can be accomplished by culturing the stem cells in the presence of a differentiation factor such as retinoic acid and an antagonist of the polypeptide of the invention which would inhibit the effects of endogenous stem cell factor activity and allow differentiation to proceed.

[0184] In vitro cultures of stem cells can be used to determine if the polypeptide of the invention exhibits stem cell growth factor activity. Stem cells are isolated from any one of various cell sources (including hematopoietic stem cells and embryonic stem cells) and cultured on a feeder layer, as described by Thompson et al. Proc. Natl. Acad. Sci, U.S.A., 92: 7844-7848 (1995), in the presence of the polypeptide of the invention alone or in combination with other growth factors or cytokines. The ability of the polypeptide of the invention to induce stem cells proliferation is determined by colony formation on semi-solid support e.g. as described by Bernstein et al., Blood, 77: 2316-2321 (1991).

[0185] 4.10.5 Hematopoiesis Regulating Activity

[0186] A polypeptide of the present invention may be involved in regulation of hematopoiesis and, consequently, in the treatment of myeloid or lymphoid cell disorders. Even marginal biological activity in support of colony forming cells or of factor-dependent cell lines indicates involvement in regulating hematopoiesis, e.g. in supporting the growth and proliferation of erythroid progenitor cells alone or in combination with other cytokines, thereby indicating utility, for example, in treating various anemias or for use in conjunction with irradiation/chemotherapy to stimulate the production of erythroid precursors and/or erythroid cells; in supporting the growth and proliferation of myeloid cells such as granulocytes and monocytes/macrophages (i.e., traditional CSF activity) useful, for example, in conjunction with chemotherapy to prevent or treat consequent myelo-suppression; in supporting the growth and proliferation of megakaryocytes and consequently of platelets thereby allowing prevention or treatment of various platelet disorders such as thuombocytopenia, and generally for use in place of or complimentary to platelet transfusions; and/or in supporting the growth and proliferation of hematopoietic stem cells which are capable of maturing to any and all of the above-mentioned hematopoietic cells and therefore find therapeutic utility in various stem cell disorders (such as those usually treated with transplantation, including, without limitation, aplastic anemia and paroxysmal nocturnal hemoglobinuria), as well as in repopulating the stem cell compartment post irradiation/chemotherapy, either in-vivo or ex-vivo (i.e., in conjunction with bone marrow transplantation or with peripheral progenitor cell transplantation (homologous or heterologous)) as normal cells or genetically manipulated for gene therapy.

[0187] Therapeutic compositions of the invention can be used in the following:

[0188] Suitable assays for proliferation and differentiation of various hematopoietic lines are cited above.

[0189] Assays for embryonic stem cell differentiation (which will identify, among others, proteins that influence embryonic differentiation hematopoiesis) include, without limitation, those described in: Johansson et al. Cellular Biology 15:141-151, 1995; Keller et al., Molecular and Cellular Biology 13:473-486, 1993; McClanahan et al., Blood 81:2903-2915, 1993.

[0190] Assays for stem cell survival and differentiation (which will identify, among others, proteins that regulate lympho-hematopoiesis) include, without limitation, those described in: Methylcellulose colony forming assays, Freshney, M. G. In Culture of Hematopoietic Cells. R. I. Freslmey, et al. eds. Vol pp. 265-268, Wiley-Liss, Inc., New York, N.Y. 1994; Hirayama et al., Proc. Natl. Acad. Sci. USA 89:5907-5911, 1992; Primitive hematopoietic colony forming cells with high proliferative potential, McNiece, I. K. and Briddell, R. A. In Culture of Hematopoietic Cells. R. I. Freshney, et al. eds. Vol pp. 23-39, Wiley-Liss, Inc., New York, N.Y. 1994; Neben et al., Experimental Hematology 22:353-359, 1994; Cobblestone area forming cell assay, Ploemacher, R. E. In Culture of Hematopoietic,Cells. R. I. Freshney, et al. eds. Vol pp. 1-21, Wiley-Liss, Inc., New York, N.Y. 1994; Long term bone marrow cultures in the presence of stromal cells, Spooncer, E., Dexter, M. and Allen, T. In Culture of Hematopoietic Cells. R. I. Freshney, et al. eds. Vol pp. 163-179, Wiley-Liss, Inc., New York, N.Y. 1994; Long term culture initiating cell assay, Sutherland, H. J. In Culture of Hematopoietic Cells. R. L. Freshney, et al. eds. Vol pp. 139-162, Wiley-Liss, Inc., New York, N.Y. 1994.

[0191] 4.10.6 Tissue Growth Activity

[0192] A polypeptide of the present invention also may be involved in bone, cartilage, tendon, ligament and/or nerve tissue growth or regeneration, as well as in wound healing and tissue repair and replacement, and in healing of burns, incisions and ulcers.

[0193] A polypeptide of the present invention which induces cartilage and/or bone growth in circumstances where bone is not normally formed, has application in the healing of bone fractures and cartilage damage or defects in humans and other animals. Compositions of a polypeptide, antibody, binding partner, or other modulator of the invention may have prophylactic use in closed as well as open fracture reduction and also in the improved fixation of artificial joints. De novo bone formation induced by an osteogenic agent contributes to the repair of congenital, trauma induced, or oncologic resection induced craniofacial defects, and also is useful in cosmetic plastic surgery.

[0194] A polypeptide of this invention may also be involved in attracting bone-forming cells, stimulating growth of bone-forming cells, or inducing differentiation of progenitors of bone-forming cells. Treatment of osteoporosis, osteoarthritis, bone degenerative disorders, or periodontal disease, such as through stimulation of bone and/or cartilage repair or by blocking inflammation or processes of tissue destruction (collagenase activity, osteoclast activity, etc.) mediated by inflammatory processes may also be possible using the composition of the invention.

[0195] Another category of tissue regeneration activity that may involve the polypeptide of the present invention is tendon/ligament formation. Induction of tendon/ligament-like tissue or other tissue formation in circumstances where such tissue is not normally formed, has application in the healing of tendon or ligament tears, deformities and other tendon or ligament defects in humans and other animals. Such a preparation employing a tendon/ligament-like tissue inducing protein may have prophylactic use in preventing damage to tendon or ligament tissue, as well as use in the improved fixation of tendon or ligament to bone or other tissues, and in repairing defects to tendon or ligament tissue. De novo tendon/ligament-like tissue formation induced by a composition of the present invention contributes to the repair of congenital, trauma induced, or other tendon or ligament defects of other origin, and is also useful in cosmetic plastic surgery for attachment or repair of tendons or ligaments. The compositions of the present invention may provide environment to attract tendon- or ligament-forming cells, stimulate growth of tendon- or ligament-forming cells, induce differentiation of progenitors of tendon- or ligament-forming cells, or induce growth of tendon/ligament cells or progenitors ex vivo for return in vivo to effect tissue repair. The compositions of the invention may also be useful in the treatment of tendinitis, carpal tunnel syndrome and other tendon or ligament defects. The compositions may also include an appropriate matrix and/or sequestering agent as a carrier as is well known in the art.

[0196] The compositions of the present invention may also be useful for proliferation of neural cells and for regeneration of nerve and brain tissue, i.e. for the treatment of central and peripheral nervous system diseases and neuropathies, as well as mechanical and traumatic disorders, which involve degeneration, death or trauma to neural cells or nerve tissue. More specifically, a composition may be used in the treatment of diseases of the peripheral nervous system, such as peripheral nerve injuries, peripheral neuropathy and localized neuropathies, and central nervous system diseases, such as Alzheimer's, Parkinson's disease, Huntington's disease, amyotrophic lateral sclerosis, and Shy-Drager syndrome. Further conditions which may be treated in accordance with the present invention include mechanical and traumatic disorders, such as spinal cord disorders, head trauma and cerebrovascular diseases such as stroke. Peripheral neuropathies resulting from chemotherapy or other medical therapies may also be treatable using a composition of the invention.

[0197] Compositions of the invention may also be useful to promote better or faster closure of non-healing wounds, including without limitation pressure ulcers, ulcers associated with vascular insufficiency, surgical and traumatic wounds, and the like.

[0198] Compositions of the present invention may also be involved in the generation or regeneration of other tissues, such as organs (including, for example, pancreas, liver, intestine, kidney, skin, endothelium), muscle (smooth, skeletal or cardiac) and vascular, (including vascular endothelium) tissue, or for promoting the growth of cells comprising such tissues. Part of the desired effects may be by inhibition or modulation of fibrotic scarring may allow normal tissue to regenerate. A polypeptide of the present invention may also exhibit angiogenic activity.

[0199] A composition of the present invention may also be useful for gut protection or regeneration and treatment of lung or liver fibrosis, reperfusion injury in various tissues, and conditions resulting from systemic cytokine damage.

[0200] A composition of the present invention may also be useful for promoting or inhibiting differentiation of tissues described above from precursor tissues or cells; or for inhibiting the growth of tissues described above.

[0201] Therapeutic compositions of the invention can be used in the following:

[0202] Assays for tissue generation activity include, without limitation, those described in: Intemational Patent Publication No. WO95/16035 (bone, cartilage, tendon); International Patent Publication No. WO95/05846 (nerve, neuronal); International Patent Publication No. WO91/07491 (skin, endothelium).

[0203] Assays for wound healing activity include, without limitation, those described in: Winter, Epidermal Wound Healing, pps. 71-112 (Maibach, H. I. and Rovee, D. T., eds.), Year Book Medical Publishers, Inc., Chicago, as modified by Eaglstein and Mertz, J. Invest. Dermatol 71:382-84 (1978).

[0204] 4.10.7 Immune Stimulating or Suppressing Activity

[0205] A polypeptide of the present invention may also exhibit immune stimulating or immune suppressing activity, including without limitation the activities for which assays are described herein. A polynucleotide of the invention can encode a polypeptide exhibiting such activities. A protein may be useful in the treatment of various immune deficiencies and disorders (including severe combined immunodeficiency (SCID)), e.g., in regulating (up or down) growth and proliferation of T and/or B lymphocytes, as well as effecting the cytolytic activity of NK cells and other cell populations. These immune deficiencies may be genetic or be caused by viral (e.g., HIV) as well as bacterial or fungal infections, or may result from autoimmune disorders. More specifically, infectious diseases causes by viral, bacterial, fungal or other infection may be treatable using a protein of the present invention, including infections by HIV, hepatitis viruses, herpes viruses, mycobacteria, Leishmania spp., malaria spp. and various fungal infections such as candidiasis. Of course, in this regard, proteins of the present invention may also be useful where a boost to the immune system generally may be desirable, i.e., in the treatment of cancer.

[0206] Autoimmune disorders which may be treated using a protein of the present invention include, for example, connective tissue disease, multiple sclerosis, systemic lupus erythematosus, rheumatoid arthritis, autoimmune pulmonary inflammation, Guillain-Barre syndrome, autoimmune thyroiditis, insulin dependent diabetes mellitis, myasthenia gravis, graft-versus-host disease and autoimmune inflammatory eye disease. Such a protein (or antagonists thereof, including antibodies) of the present invention may also to be useful in the treatment of allergic reactions and conditions (e.g. anaphylaxis, serum sickness, drug reactions, food allergies, insect venom allergies, mastocytosis, allergic rhinitis, hypersensitivity pneumonitis, urticaria, angioedema, eczema, atopic dermatitis, allergic contact dermatitis, erythema multiforme, Stevens-Johnson syndrome, allergic conjunctivitis, atopic keratoconjunctivitis, venereal keratoconjunctivitis, giant papillary conjunctivitis and contact allergies), such as asthma (particularly allergic asthma) or other respiratory problems. Other conditions, in which immune suppression is desired (including, for example, organ transplantation), may also be treatable using a protein (or antagonists thereof) of the present invention. The therapeutic effects of the polypeptides or antagonists thereof on allergic reactions can be evaluated by in vivo animals models such as the cumulative contact enhancement test (Lastbom et al., Toxicology 125: 59-66, 1998), skin prick test (Hoffmann et al., Allergy 54: 446-54, 1999), guinea pig skin sensitization test (Vohr et al., Arch. Toxocol. 73: 501-9), and murine local lymph node assay (Kimber et al., J. Toxicol. Environ. Health 53: 563-79).

[0207] Using the proteins of the invention it may also be possible to modulate immune responses, in a number of ways. Down regulation may be in the form of inhibiting or blocking an immune response already in progress or may involve preventing the induction of an immune response. The functions of activated T cells may be inhibited by suppressing T cell responses or by inducing specific tolerance in T cells, or both. Immunosuppression of T cell responses is generally an active, non-antigen-specific, process which requires continuous exposure of the T cells to the suppressive agent. Tolerance, which involves inducing non-responsiveness or anergy in T cells, is distinguishable from immunosuppression in that it is generally antigen-specific and persists after exposure to the tolerizing agent has ceased. Operationally, tolerance can be demonstrated by the lack of a T cell response upon reexposure to specific antigen in the absence of the tolerizing agent.

[0208] Down regulating or preventing one or more antigen functions (including without limitation B lymphocyte antigen functions (such as, for example, B7)), e.g., preventing high level lymphokine synthesis by activated T cells, will be useful in situations of tissue, skin and organ transplantation and in graft-versus-host disease (GVHD). For example, blockage of T cell function should result in reduced tissue destruction in tissue transplantation. Typically, in tissue transplants, rejection of the transplant is initiated through its recognition as foreign by T cells, followed by an immune reaction that destroys the transplant. The administration of a therapeutic composition of the invention may prevent cytokine synthesis by immune cells, such as T cells, and thus acts as an immunosuppressant. Moreover, a lack of costimulation may also be sufficient to anergize the T cells, thereby inducing tolerance in a subject. Induction of long-term tolerance by B lymphocyte antigen-blocking reagents may avoid the necessity of repeated administration of these blocking reagents. To achieve sufficient immunosuppression or tolerance in a subject, it may also be necessary to block the function of a combination of B lymphocyte antigens.

[0209] The efficacy of particular therapeutic compositions in preventing organ transplant rejection or GVHD can be assessed using animal models that are predictive of efficacy in humans. Examples of appropriate systems which can be used include allogeneic cardiac grafts in rats and xenogeneic pancreatic islet cell grafts in mice, both of which have been used to examine the immunosuppressive effects of CTLA4Ig fusion proteins in vivo as described in Lenschow et al., Science 257:789-792 (1992) and Turka et al., Proc. Natl. Acad. Sci USA, 89:11102-11105 (1992). In addition, murine models of GVHD (see Paul ed., Fundamental Immunology, Raven Press, New York, 1989, pp. 846-847) can be used to determine the effect of therapeutic compositions of the invention on the development of that disease.

[0210] Blocking antigen function may also be therapeutically useful for treating autoimmune diseases. Many autoimmune disorders are the result of inappropriate activation of T cells that are reactive against self-tissue and which promote the production of cytokines and autoantibodies involved in the pathology of the diseases. Preventing the activation of autoreactive T cells may reduce or eliminate disease symptoms. Administration of reagents which block stimulation of T cells can be used to inhibit T cell activation and prevent production of autoantibodies or T cell-derived cytokines which may be involved in the disease process. Additionally, blocking reagents may induce antigen-specific tolerance of autoreactive T cells which could lead to long-term relief from the disease. The efficacy of blocking reagents in preventing or alleviating autoimmune disorders can be determined using a number of well-characterized animal models of human autoimmune diseases. Examples include murine experimental autoimmune encephalitis, systemic lupus erythmatosis in MRL/lpr/lpr mice or NZB hybrid mice, murine autoiinmune collagen arthritis, diabetes mellitus in NOD mice and BB rats, and murine experimental myasthenia gravis (see Paul ed., Fundamental Immunology, Raven Press, New York, 1989, pp. 840-856).

[0211] Upregulation of an antigen function (e.g., a B lymphocyte antigen function), as a means of up regulating immune responses, may also be useful in therapy. Upregulation of immune responses may be in the form of enhancing an existing immune response or eliciting an initial immune response. For example, enhancing an immune response may be useful in cases of viral infection, including systemic viral diseases such as influenza, the common cold, and encephalitis.

[0212] Alternatively, anti-viral immune responses may be enhanced in an infected patient by removing T cells from the patient, costimulating the T cells in vitro with viral antigen-pulsed APCs either expressing a peptide of the present invention or together with a stimulatory form of a soluble peptide of the present invention and reintroducing the in vitro activated T cells into the patient. Another method of enhancing anti-viral immune responses would be to isolate infected cells from a patient, transfect them with a nucleic acid encoding a protein of the present invention as described herein such that the cells express all or a portion of the protein on their surface, and reintroduce the transfected cells into the patient. The infected cells would now be capable of delivering a costimulatory signal to, and thereby activate, T cells in vivo.

[0213] A polypeptide of the present invention may provide the necessary stimulation signal to T cells to induce a T cell mediated immune response against the transfected tumor cells. In addition, tumor cells which lack MHC class I or MHC class II molecules, or which fail to reexpress sufficient mounts of MHC class I or MHC class II molecules, can be transfected with nucleic acid encoding all or a portion of (e.g., a cytoplasmic-domain truncated portion) of an MHC class I alpha chain protein and β₂ microglobulin protein or an MHC class II alpha chain protein and an MHC class II beta chain protein to thereby express MHC class I or MHC class II proteins on the cell surface. Expression of the appropriate class I or class II MHC in conjunction with a peptide having the activity of a B lymphocyte antigen (e.g., B7-1, B7-2, B7-3) induces a T cell mediated immune response against the transfected tumor cell. Optionally, a gene encoding an antisense construct which blocks expression of an MHC class II associated protein, such as the invariant chain, can also be cotransfected with a DNA encoding a peptide having the activity of a B lymphocyte antigen to promote presentation of tumor associated antigens and induce tumor specific immunity. Thus, the induction of a T cell mediated immune response in a human subject may be sufficient to overcome tumor-specific tolerance in the subject.

[0214] The activity of a protein of the invention may, among other means, be measured by the following methods:

[0215] Suitable assays for thymocyte or splenocyte cytotoxicity include, without limitation, those described in: Current Protocols in Immunology, Ed by J. E. Coligan, A. M. Kluisbeek, D. H. Margulies, E. M. Shevach, W. Strober, Pub. Greene Publishing Associates and Wiley-Interscience (Chapter 3, In Vitro assays for Mouse Lymphocyte Function 3.1-3.19; Chapter 7, Immunologic studies in Humans); Herrrann et al., Proc. Natl. Acad. Sci. USA 78:2488-2492, 1981; Hernann et al., J. Immunol. 128:1968-1974, 1982; Handa et al., J. Immunol. 135:1564-1572, 1985; Takai et al., I. Immunol. 137:3494-3500, 1986; Takai et al., J. Immunol. 140:508-512, 1988; Bowman et al., J. Virology 61:1992-1998; Bertagnolli et al., Cellular Immunology 133:327-341, 1991; Brown et al., J. Immunol. 153:3079-3092, 1994.

[0216] Assays for T-cell-dependent immunoglobulin responses and isotype switching (which will identify, among others, proteins that modulate T-cell dependent antibody responses and that affect Th1/Th2 profiles) include, without limitation, those described in: Maliszewski, J. lnmunol. 144:3028-3033, 1990; and Assays for B cell function: In vitro antibody production, Mond, J. J. and Brunswick, M. In Current Protocols in Immunology. J. E. e.a. Coligan eds. Vol 1 pp. 3.8.1-3.8.16, John Wiley and Sons, Toronto. 1994.

[0217] Mixed lymphocyte reaction (MLR) assays (which will identify, among others, proteins that generate predominantly Thl and CTL responses) include, without limitation, those described in: Current Protocols in Immunology, Ed by J. E. Coligan, A. M. Kruisbeek, D. H. Margulies, E. M. Shevach, W. Strober, Pub. Greene Publishing Associates and Wiley-Interscience (Chapter 3, In Vitro assays for Mouse Lymphocyte Function 3.1-3.19; Chapter 7, Immunologic studies in Humans); Takai et al., J. Inuunol. 137:3494-3500, 1986; Takai et al., J. Inuunol. 140:508-512, 1988; Bertagnolli et al., J. Immunol. 149:3778-3783, 1992.

[0218] Dendritic cell-dependent assays (which will identify, among others, proteins expressed by dendritic cells that activate naive T-cells) include, without limitation, those described in: Guery et al., J. Immunol. 134:536-544, 1995; Inaba et al., Journal of Experimental Medicine 173:549-559, 1991; Macatonia et al., Journal of Immunology 154:5071-5079, 1995; Porgador et al., Journal of Experimental Medicine 182:255-260, 1995; Nair et al., Journal of Virology 67:4062-4069, 1993; Huang et al., Science 264:961-965, 1994; Macatonia et al., Journal of Experimental Medicine 169:1255-1264, 1989; Bhardwaj et al., Journal of Clinical Investigation 94:797-807, 1994; and Inaba et al., Journal of Experimental Medicine 172:631-640, 1990.

[0219] Assays for lymphocyte survival/apoptosis (which will identify, among others, proteins that prevent apoptosis after superantigen induction and proteins that regulate lymphocyte homeostasis) include, without limitation, those described in: Darzynkiewicz et al., Cytometry 13:795-808, 1992; Gorczyca et al., Leukemia 7:659-670, 1993; Gorczyca et al., Cancer Research 53:1945-1951, 1993; Itoh et al., Cell 66:233-243, 1 991; Zacharchuk, Journal of Immunology 145:4037-4045, 1990; Zamai et al., Cytometry 14:891-897, 1993; Gorczyca et al., International Journal of Oncology 1:639-648, 1992.

[0220] Assays for proteins that influence early steps of T-cell commitment and development include, without limitation, those described in: Antica et al., Blood 84:111-117, 1994; Fine et al., Cellular Immunology 155:111-122, 1994; Galy et al., Blood 85:2770-2778, 1995; Toki et al., Proc. Nat. Acad Sci. USA 88:7548-7551, 1991.

[0221] 4.10.8 Activin/Inhibin Activity

[0222] A polypeptide of the present invention may also exhibit activin- or inhibin-related activities. A polynucleotide of the invention may encode a polypeptide exhibiting such characteristics. Inhibins are characterized by their ability to inhibit the release of follicle stimulating hormone (FSH), while activins and are characterized by their ability to stimulate the release of follicle stimulating hormone (FSH). Thus, a polypeptide of the present invention, alone or in heterodimers with a member of the inhibin family, may be useful as a contraceptive based on the ability of inhibins to decrease fertility in female mammals and decrease spermatogenesis in male mammals. Administration of sufficient amounts of other inhibins can induce infertility in these mammals. Alternatively, the polypeptide of the invention, as a homodimer or as a heterodimer with other protein subunits of the inhibin group, may be useful as a fertility inducing therapeutic, based upon the ability of activin molecules in stimulating FSH release from cells of the anterior pituitary. See, for example, U.S. Pat. No. 4,798,885. A polypeptide of the invention may also be useful for advancement of the onset of fertility in sexually immature mammals, so as to increase the lifetime reproductive performance of domestic animals such as, but not limited to, cows, sheep and pigs.

[0223] The activity of a polypeptide of the invention may, among other means, be measured by the following methods.

[0224] Assays for activin/inhibin activity include, without limitation, those described in: Vale et al., Endocrinology 91:562-572, 1972; Ling et al., Nature 321:779-782, 1986; Vale et al., Nature 321:776-779, 1986; Mason et al., Nature 318:659-663, 1985; Forage et al., Proc. Natl. Acad. Sci. USA 83:3091-3095, 1986.

[0225] 4.10.9 Chemotactic/Chemokinetic Activity

[0226] A polypeptide of the present invention maybe involved in chemotactic or chemokinetic activity for mammalian cells, including, for example, monocytes, fibroblasts, neutrophils, T-cells, mast cells, eosinophils, epithelial and/or endothelial cells. A polynucleotide of the invention can encode a polypeptide exhibiting such attributes. Chemotactic and chemokinetic receptor activation can be used to mobilize or attract a desired cell population to a desired site of action. Chemotactic or chemokinetic compositions (e.g. proteins, antibodies, binding partners, or modulators of the invention) provide particular advantages in treatment of wounds and other trauma to tissues, as well as in treatment of localized infections. For example, attraction of lymphocytes, monocytes or neutrophils to tumors or sites of infection may result in improved immune responses against the tumor or infecting agent.

[0227] A protein or peptide has chemotactic activity for a particular cell population if it can stimulate, directly or indirectly, the directed orientation or movement of such cell population. Preferably, the protein or peptide has the ability to directly stimulate directed movement of cells. Whether a particular protein has chemotactic activity for a population of cells can be readily determined by employing such protein or peptide in any known assay for cell chemotaxis.

[0228] Therapeutic compositions of the invention can be used in the following:

[0229] Assays for chemotactic activity (which will identify proteins that induce or prevent chemotaxis) consist of assays that measure the ability of a protein to induce the migration of cells across a membrane as well as the ability of a protein to induce the adhesion of one cell population to another cell population. Suitable assays for movement and adhesion include, without limitation, those described in: Current Protocols in Immunology, Ed by J. E. Coligan, A. M. Kruisbeek, D. H. Marguiles, E. M. Shevach, W. Strober, Pub. Greene Publishing Associates and Wiley-lnterscience (Chapter 6.12, Measurement of alpha and beta Chemokines 6.12.1-6.12.28; Taub et al. J. Clin. Invest. 95:1370-1376, 1995; Lind et al. APMIS 103:140-146, 1995; Muller et al Eur. J. Immunol. 25:1744-1748; Gruber et al. J. of Immunol. 152:5860-5867, 1994; Johnston et al. J. of hmmunol. 153:1762-1768, 1994.

[0230] 4.10.10 Hemostatic and Thrombolytic Activity

[0231] A polypeptide of the invention may also be involved in hemostatis or thrombolysis or thrombosis. A polynucleotide of the invention can encode a polypeptide exhibiting such attributes. Compositions may be useful in treatment of various coagulation disorders (including hereditary disorders, such as hemophilias) or to enhance coagulation and other hemostatic events in treating wounds resulting from trauma, surgery or other causes. A composition of the invention may also be usefull for dissolving or inhibiting formation of thromboses and for treatment and prevention of conditions resulting therefrom (such as, for example, infarction of cardiac and central nervous system vessels (e.g., stroke).

[0232] Therapeutic compositions of the invention can be used in the following:

[0233] Assay for hemostatic and thrombolytic activity include, without limitation, those described in: Linet et al., J. Clin. Pharmacol. 26:131-140, 1986; Burdick et al., Thrombosis Res. 45:413-419, 1987; Humphrey et al., Fibrinolysis 5:71-79 (1991); Schaub, Prostaglandins 35:467-474, 1988.

[0234] 4.10.11 Cancer Diagnosis and Therapy

[0235] Polypeptides of the invention may be involved in cancer cell generation, proliferation or metastasis. Detection of the presence or amount of polynucleotides or polypeptides of the invention may be useful for the diagnosis and/or prognosis of one or more types of cancer. For example, the presence or increased expression of a polynucleotide/polypeptide of the invention may indicate a hereditary risk of cancer, a precancerous condition, or an ongoing malignancy. Conversely, a defect in the gene or absence of the polypeptide may be associated with a cancer condition. Identification of single nucleotide polymorphisms associated with cancer or a predisposition to cancer may also be useful for diagnosis or prognosis.

[0236] Cancer treatments promote tumor regression by inhibiting tumor cell proliferation, inhibiting angiogenesis (growth of new blood vessels that is necessary to support tumor growth) and/or prohibiting metastasis by reducing tumor cell motility or invasiveness. Therapeutic compositions of the invention may be effective in adult and pediatric oncology including in solid phase tumors/malignancies, locally advanced tumors, human soft tissue sarcomas, metastatic cancer, including lymphatic metastases, blood cell malignancies including multiple myeloma, acute and chronic leukemias, and lymphomas, head and neck cancers including mouth cancer, larynx cancer and thyroid cancer, lung cancers including small cell carcinoma and non-small cell cancers, breast cancers including small cell carcinoma and ductal carcinoma, gastrointestinal cancers including esophageal cancer, stomach cancer, colon cancer, colorectal cancer and polyps associated with colorectal neoplasia, pancreatic cancers, liver cancer, urologic cancers including bladder cancer and prostate cancer, malignancies of the female genital tract including ovarian carcinoma, uterine (including endometrial) cancers, and solid tumor in the ovarian follicle, kidney cancers including renal cell carcinoma, brain cancers including intrinsic brain tumors, neuroblastoma, astrocytic brain tumors, gliomas, metastatic tumor cell invasion in the central nervous system, bone cancers including osteomas, skin cancers including malignant melanoma, tumor progression of human skin keratinocytes, squamous cell carcinoma, basal cell carcinoma, hemangiopericytoma and Karposi's sarcoma.

[0237] Polypeptides, polynucleotides, or modulators of polypeptides of the invention (including inhibitors and stimulators of the biological activity of the polypeptide of the invention) may be administered to treat cancer. Therapeutic compositions can be administered in therapeutically effective dosages alone or in combination with adjuvant cancer therapy such as surgery, chemotherapy, radiotherapy, thermotherapy, and laser therapy, and may provide a beneficial effect, e.g. reducing tumor size, slowing rate of tumor growth, inhibiting metastasis, or otherwise improving overall clinical condition, without necessarily eradicating the cancer.

[0238] The composition can also be administered in therapeutically effective amounts as a portion of an anti-cancer cocktail. An anti-cancer cocktail is a mixture of the polypeptide or modulator of the invention with one or more anti-cancer drugs in addition to a pharmaceutically acceptable carrier for delivery. The use of anti-cancer cocktails as a cancer treatment is routine. Anti-cancer drugs that are well known in the art and can be used as a treatment in combination with the polypeptide or modulator of the invention include: Actinomycin D, Aminoglutethimide, Asparaginase, Bleomycin, Busulfan, Carboplatin, Carmustine, Chlorambucil, Cisplatin (cis-DDP), Cyclophosphamide, Cytarabine HCl (Cytosine arabinoside), Dacarbazine, Dactinomycin, Daunorubicin HCl, Doxorubicin HCl, Estramustine phosphate sodium, Etoposide (V16-213), Floxuridine, 5-Fluorouracil (5-Fu), Flutamide, Hydroxyirea hydroxycarbamide), Ifosfamide, Interferon Alpha-2a, Interferon Alpha-2b, Leuprolide acetate (LHRH-releasing factor analog), Lomustine, Mechlorethamine HCl (nitrogen mustard), Melphalan, Mercaptopurine, Mesna, Methotrexate (MTX), Mitomycin, Mitoxantrone HCl, Octreotide, Plicamycin, Procarbazine HCl, Streptozocin, Tamoxifen citrate, Thioguanine, Thiotepa, Vinblastine sulfate, Vincristine sulfate, Amsacrine, Azacitidine, Hexamethylmelamine, Interleukin-2, Mitoguazone, Pentostatin, Semustine, Teniposide, and Vindesine sulfate.

[0239] In addition, therapeutic compositions of the invention may be used for prophylactic treatment of cancer. There are hereditary conditions and/or environmental situations (e.g. exposure to carcinogens) known in the art that predispose an individual to developing cancers. Under these circumstances, it may be beneficial to treat these individuals with therapeutically effective doses of the polypeptide of the invention to reduce the risk of developing cancers.

[0240] In vitro models can be used to determine the effective doses of the polypeptide of the invention as a potential cancer treatment. These in vitro models include proliferation assays of cultured tumor cells, growth of cultured tumor cells in soft agar (see Freshney, (1987) Culture of Animal Cells: A Manual of Basic Technique, Wily-Liss, New York, N.Y. Ch 18 and Ch 21), tumor systems in nude mice as described in Giovanella et al., J. Natl. Can. Inst., 52: 921-30 (1974), mobility and invasive potential of tumor cells in Boyden Chamber assays as described in Pilkington et al., Anticancer Res., 17: 4107-9 (1997), and angiogenesis assays such as induction of vascularization of the chick chorioallantoic membrane or induction of vascular endothelial cell migration as described in Ribatta et al., Intl. J. Dev. Biol., 40: 1189-97 (1999) and Li et al., Clin. Exp. Metastasis, 17:423-9 (1999), respectively. Suitable tumor cells lines are available, e.g. from American Type Tissue Culture Collection catalogs.

[0241] 4.10.12 Receptor/Ligand Activity

[0242] A polypeptide of the present invention may also demoiistrate activity as receptor, receptor ligand or inhibitor or agonist of receptor/ligand interactions. A polynucleotide of the invention can encode a polypeptide exhibiting such characteristics. Examples of such receptors and ligands include, without limitation, cytokine receptors and their ligands, receptor kinases and their ligands, receptor phosphatases and their ligands, receptors involved in cell-cell interactions and their ligands (including without limitation, cellular adhesion molecules (such as selecting, integrins and their ligands) and receptor/ligand pairs involved in antigen presentation, antigen recognition and development of cellular and humoral iimune responses. Receptors and ligands are also useful for screening of potential peptide or small molecule inhibitors of the relevant receptor/ligand interaction. A protein of the present invention (including, without limitation, fragments of receptors and ligands) may themselves be useful as inhibitors of receptor/ligand interactions.

[0243] The activity of a polypeptide of the invention may, among other means, be measured by the following methods:

[0244] Suitable assays for receptor-ligand activity include without limitation those , described in: Current Protocols in Immunology, Ed by J. E. Coligan, A. M. Kruisbeek, D. H. Margulies, E. M. Shevach, W. Strober, Pub. Greene Publishing Associates and Wiley-Interscience (Chapter 7.28, Measurement of Cellular Adhesion under static conditions 7.28.1- 7.28.22), Takai et al., Proc. Natl. Acad. Sci. USA 84:6864-6868, 1987; Bierer et al., J. Exp. Med. 168:1145-1156, 1988; Rosenstein et al., J. Exp. Med. 169:149-160 1989; Stoltenborg et al., J. Immunol. Methods 175:59-68, 1994; Stitt et al., Cell 80:661-670, 1995.

[0245] By way of example, the polypeptides of the invention may be used as a receptor for a ligand(s) thereby transmitting the biological activity of that ligand(s). Ligands may be identified through binding assays, affinity chromatography, dihybrid screening assays, BIAcore assays, gel overlay assays, or other methods known in the art.

[0246] Studies characterizing drugs or proteins as agonist or antagonist or partial agonists or a partial antagonist require the use of other proteins as competing ligands. The polypeptides of the present invention or ligand(s) thereof may be labeled by being coupled to radioisotopes, calorimetric molecules or a toxin molecules by conventional methods. (“Guide to Protein Purification” Murray P. Deutscher (ed) Methods in Enzymology Vol. 182 (1990) Academic Press, Inc. San Diego). Examples of radioisotopes include, but are not limited to, tritium and carbon-14. Examples of colorimetric molecules include, but are not limited to, fluorescent molecules such as fluorescamine, or rhodamine or other calorimetric molecules. Examples of toxins include, but are not limited, to ricin.

[0247] 4.10.13 Drug Screening

[0248] This invention is particularly useful for screening chemical compounds by using the novel polypeptides or binding fragments thereof in any of a variety of drug screening techniques. The polypeptides or fragments employed in such a test may either be free in solution, affixed to a solid support, borne on a cell surface or located intracellularly. One method of drug screening utilizes eukaryotic or prokaryotic host cells which are stably transformed with recombinant nucleic acids expressing the polypeptide or a fragment thereof. Drugs are screened against such transformed cells in competitive binding assays. Such cells, either in viable or fixed form, can be used for standard binding assays. One may measure, for example, the formation of complexes between polypeptides of the invention or fragments and the agent being tested or examine the diminution in complex formation between the novel polypeptides and an appropriate cell line, which are well known in the art.

[0249] Sources for test compounds that may be screened for ability to bind to or modulate (i.e., increase or decrease) the activity of polypeptides of the invention include (1) inorganic and organic chemical libraries, (2) natural product libraries, and (3) combinatorial libraries comprised of either random or mimetic peptides, oligonucleotides or organic molecules.

[0250] Chemical libraries may be readily synthesized or purchased from a number of commercial sources, and may include structural analogs of known compounds or compounds that are identified as “hits” or “leads” via natural product screening.

[0251] The sources of natural product libraries are microorganisms (including bacteria and fungi), animals, plants or other vegetation, or marine organisms, and libraries of mixtures for screening may be created by: (1) fermentation and extraction of broths from soil, plant or marine microorganisms or (2) extraction of the organisms themselves. Natural product libraries include polyketides, non-ribosomal peptides, and (non-naturally occurring) variants thereof. For a review, see Science 282:63-68 (1998).

[0252] Combinatorial libraries are composed of large numbers of peptides, oligonucleotides or organic compounds and can be readily prepared by traditional automated synthesis methods, PCR, cloning or proprietary synthetic methods. Of particular interest are peptide and oligonucleotide combinatorial libraries. Still other libraries of interest include peptide, protein, peptidomimetic, multiparallel synthetic collection, recombinatorial, and polypeptide libraries. For a review of combinatorial chemistry and libraries created therefrom, see Myers, Curr. Opin. Biotechnol. 8:701-707 (1997). For reviews and examples of peptidomimetic libraries, see Al-Obeidi et al., Mol. Biotechnol, 9(3):205-23 (1998); Hruby et al., Curr Opin Chem Biol, 1(1):114-19 (1997); Dorner et al., Bioorg Med Chem, 4(5):709-15 (1996) (alkylated dipeptides).

[0253] Identification of modulators through use of the various libraries described herein permits modification of the candidate “hit” (or “lead”) to optimize the capacity of the “hit” to bind a polypeptide of the invention. The molecules identified in the binding assay are then tested for antagonist or agonist activity in in vivo tissue culture or animal models that are well known in the art. In brief, the molecules are titrated into a plurality of cell cultures or animals and then tested for either cell/animal death or prolonged survival of the animal/cells.

[0254] The binding molecules thus identified may be complexed with toxins, e.g., ricin or cholera, or with other compounds that are toxic to cells such as radioisotopes. The toxin-binding molecule complex is then targeted to a tumor or other cell by the specificity of the binding molecule for a polypeptide of the invention. Alternatively, the binding molecules may be complexed with imaging agents for targeting and imaging purposes.

[0255] 4.10.14 Assay for Receptor Activity

[0256] The invention also provides methods to detect specific binding of a polypeptide e.g. a ligand or a receptor. The art provides numerous assays particularly useful for identifying previously unknown binding partners for receptor polypeptides of the invention. For example, expression cloning using mammalian or bacterial cells, or dihybrid screening assays can be used to identify polynucleotides encoding binding partners. As another example, affinity chromatography with the appropriate immobilized polypeptide of the invention can be used to isolate polypeptides that recognize and bind polypeptides of the invention. There are a number of different libraries used for the identification of compounds, and in particular small molecules, that modulate (i.e., increase or decrease) biological activity of a polypeptide of the invention. Ligands for receptor polypeptides of the invention can also be identified by adding exogenous ligands, or cocktails of ligands to two cells populations that are genetically identical except for the expression of the receptor of the invention: one cell population expresses the receptor of the invention whereas the other does not. The responses of the two cell populations to the addition of ligands(s) are then compared. Alternatively, an expression library can be co-expressed with the polypeptide of the invention in cells and assayed for an autocrine response to identify potential ligand(s). As still another example, BIAcore assays, gel overlay assays, or other methods known in the art can be used to identify binding partner polypeptides, including, (1) organic and inorganic chemical libraries, (2) natural product libraries, and (3) combinatorial libraries comprised of random peptides, oligonucleotides or organic molecules.

[0257] The role of downstream intracellular signaling molecules in the signaling cascade of the polypeptide of the invention can be determined. For example, a chimeric protein in which the cytoplasmic domain of the polypeptide of the invention is fused to the extracellular portion of a protein, whose ligand has been identified, is produced in a host cell. The cell is then incubated with the ligand specific for the extracellular portion of the chimeric protein, thereby activating the chimeric receptor. Known downstream proteins involved in intracellular signaling can then be assayed for expected modifications i.e. phosphorylation. Other methods known to those in the art can also be used to identify signaling molecules involved in receptor activity.

[0258] 4.10.15 Anti-Inflammatory Activity

[0259] Compositions of the present invention may also exhibit anti-inflammatory activity. The anti-inflammatory activity may be achieved by providing a stimulus to cells involved in the inflammatory response, by inhibiting or promoting cell-cell interactions (such as, for example, cell adhesion), by inhibiting or promoting chemotaxis of cells involved in the inflammatory process, inhibiting or promoting cell extravasation, or by stimulating or suppressing production of other factors which more directly inhibit or promote an inflammatory response. Compositions with such activities can be used to treat inflammatory conditions including chronic or acute conditions), including without limitation intimation associated with infection (such as septic shock, sepsis or systemic inflammatory response syndrome (SIRS)), ischemia-reperfusion injury, endotoxin lethality, arthritis, complement-mediated hyperacute rejection, nephritis, cytokine or chemokine-induced lung injury, inflammatory bowel disease, Crohn's disease or resulting from over production of cytokines such as TNF or IL-1. Compositions of the invention may also be useful to treat anaphylaxis and hypersensitivity to an antigenic substance or material. Compositions of this invention may be utilized to prevent or treat conditions such as, but not limited to, sepsis, acute pancreatitis, endotoxin shock, cytokine induced shock, rheumatoid arthritis, chronic inflammatory arthritis, pancreatic cell damage from diabetes mellitus type 1, graft versus host disease, inflammatory bowel disease, inflamation associated with pulmonary disease, other autoimmune disease or inflammatory disease, an antiproliferative agent such as for acute or chronic mylegenous leukemia or in the prevention of premature labor secondary to intrauterine infections.

[0260] 4.10.16 Leukemias

[0261] Leukemias and related disorders may be treated or prevented by administration of a therapeutic that promotes or inhibits function of the polynucleotides and/or polypeptides of the invention. Such leukemias and related disorders include but are not limited to acute leukemia, acute lymphocytic leukemia, acute myelocytic leukemia, myeloblastic, promyelocytic, myelomonocytic, monocytic, erythroleukemia, chronic leukemia, chronic myelocytic (granulocytic) leukemia and chronic lymphocytic leukemia (for a review of such disorders, see Fishman et al., 1985, Medicine, 2d Ed., J.B. Lippincott Co., Philadelphia).

[0262] 4.10.17 Nervous System Disorders

[0263] Nervous system disorders, involving cell types which can be tested for efficacy of intervention with compounds that modulate the activity of the polynucleotides and/or polypeptides of the invention, and which can be treated upon thus observing an indication of therapeutic utility, include but are not limited to nervous system injuries, and diseases or disorders which result in either a disconnection of axons, a diminution or degeneration of neurons, or demyelination. Nervous system lesions which may be treated in a patient (including human and non-human mammalian patients) according to the invention include but are not limited to the following lesions of either the central (including spinal cord, brain) or peripheral nervous systems:

[0264] (i) traumatic lesions, including lesions caused by physical injury or associated with surgery, for example, lesions which sever a portion of the nervous system, or compression injuries;

[0265] (ii) ischemic lesions, in which a lack of oxygen in a portion of the nervous system results in neuronal injury or death, including cerebral infarction or ischemia, or spinal cord infarction or ischemia;

[0266] (iii) infectious lesions, in which a portion of the nervous system is destroyed or injured as a result of infection, for example, by an abscess or associated with infection by human immunodeficiency virus, herpes zoster, or herpes simplex virus or with Lyme disease, tuberculosis, syphilis;

[0267] (iv) degenerative lesions, in which a portion of the nervous system is destroyed or injured as a result of a degenerative process including but not limited to degeneration associated with Parkinson's disease, Alzheimer's disease, Huntington's chorea, or amyotrophic lateral sclerosis;

[0268] (v) lesions associated with nutritional diseases or disorders, in which a portion of the nervous system is destroyed or injured by a nutritional disorder or disorder of metabolism including but not limited to, vitamin B12 deficiency, folic acid deficiency, Wemicke disease, tobacco-alcohol amblyopia, Marchiafava-Bignami disease (primary degeneration of the corpus callosum), and alcoholic cerebellar degeneration;

[0269] (vi) neurological lesions associated with systemic diseases including but not limited to diabetes (diabetic neuropathy, Bell's palsy), systemic lupus erythematosus, carcinoma, or sarcoidosis;

[0270] (vii) lesions caused by toxic substances including alcohol, lead, or particular neurotoxins; and

[0271] (viii) demyelinated lesions in which a portion of the nervous system is destroyed or injured by a demyelinating disease including but not limited to multiple sclerosis, human immunodeficiency virus-associated myelopathy, transverse myelopathy or various etiologies, progressive multifocal leukoencephalopathy, and central pontine myelinolysis.

[0272] Therapeutics which are useful according to the invention for treatment of a nervous system disorder may be selected by testing for biological activity in promoting the survival or differentiation of neurons. For example, and not by way of limitation, therapeutics which elicit any of the following effects may be useful according to the invention:

[0273] (i) increased survival time of neurons in culture;

[0274] (ii) increased sprouting of neurons in culture or in vivo;

[0275] (iii) increased production of a neuron-associated molecule in culture or in vivo, e.g., choline acetyltransferase or acetylcholinesterase with respect to motor neurons; or

[0276] (iv) decreased symptoms of neuron dysfunction in vivo.

[0277] Such effects may be measured by any method known in the art. In preferred, non-limiting embodiments, increased survival of neurons may be measured by the method set forth in Arakawa et al. (1990, J. Neurosci. 10:3507-3515); increased sprouting of neurons may be detected by methods set forth in Pestronk et al. (1980, Exp. Neurol. 70:65-82) or Brown et al. (1981, Ann. Rev. Neurosci. 4:17-42); increased production of neuron-associated molecules may be measured by bioassay, enzymatic assay, antibody binding, Northern blot assay, etc., depending on the molecule to be measured; and motor neuron dysfunction may be measured by assessing the physical manifestation of motor neuron disorder, e.g., weakness, motor neuron conduction velocity, or functional disability.

[0278] In specific embodiments, motor neuron disorders that may be treated according to the invention include but are not limited to disorders such as infarction, infection, exposure to toxin, trauma, surgical damage, degenerative disease or malignancy that may affect motor neurons as well as other components of the nervous system, as well as disorders that selectively affect neurons such as amyotrophic lateral sclerosis, and including but not limited to progressive spinal muscular atrophy, progressive bulbar palsy, primary lateral sclerosis, infantile and juvenile muscular atrophy, progressive bulbar paralysis of childhood (Fazio-Londe syndrome), poliomyelitis and the post polio syndrome, and Hereditary Motorsensory Neuropathy (Charcot-Marie-Tooth Disease).

[0279] 4.10.18 Other Activities

[0280] A polypeptide of the invention may also exhibit one or more of the following additional activities or effects: inhibiting the growth, infection or function of, or killing, infectious agents, including, without limitation, bacteria, viruses, fungi and other parasites; effecting (suppressing or enhancing) bodily characteristics, including, without limitation, height, weight, hair color, eye color, skin, fat to lean ratio or other tissue pigmentation, or organ or body part size or shape (such as, for example, breast augmentation or diminution, change in bone form or shape); effecting biorhythms or circadian cycles or rhythms; effecting the fertility of male or female subjects; effecting the metabolism, catabolism, anabolism, processing, utilization, storage or elimination of dietary fat, lipid, protein, carbohydrate, vitamins, minerals, co-factors or other nutritional factors or component(s); effecting behavioral characteristics, including, without limitation, appetite, libido, stress, cognition (including cognitive disorders), depression (including depressive disorders) and violent behaviors; providing analgesic effects or other pain reducing effects; promoting differentiation and growth of embryonic stem cells in lineages other than hematopoietic lineages; hormonal or endocrine activity; in the case of enzymes, correcting deficiencies of the enzyme and treating deficiency-related diseases; treatment of hyperproliferative disorders (such as, for example, psoriasis); immunoglobulin-like activity (such as, for example, the ability to bind antigens or complement); and the ability to act as an antigen in a vaccine composition to raise an immune response against such protein or another material or entity which is cross-reactive with such protein.

[0281] 4.10.19 Identification of Polymorphisms

[0282] The demonstration of polymorphisms makes possible the identification of such polymorphisms in human subjects and the pharmacogenetic use of this information for diagnosis and treatment. Such polymorphisms may be associated with, e.g., differential predisposition or susceptibility to various disease states (such as disorders involving inflammation or immune response) or a differential response to drug administration, and this genetic information can be used to tailor preventive or therapeutic treatment appropriately. For exarnple, the existence of a polymorphism associated with a predisposition to inflammation or autoimmune disease makes possible the diagnosis of this condition in humans by identifying the presence of the polymorphism.

[0283] Polymorphisms can be identified in a variety of ways known in the art which all generally involve obtaining a sample from a patient, analyzing DNA from the sample, optionally involving isolation or amplification of the DNA, and identifying the presence of the polymorphism in the DNA. For example, PCR may be used to amplify an appropriate fragment of genomic DNA which may then be sequenced. Alternatively, the DNA may be subjected to allele-specific oligonucleotide hybridization (in which appropriate oligonucleotides are hybridized to the DNA under conditions permitting detection of a single base mismatch) or to a single nucleotide extension assay (in which an oligonucleotide that hybridizes immediately adjacent to the position of the polymorphism is extended with one or more labeled nucleotides). In addition, traditional restriction fragment length polymorphism analysis (using restriction enzymes that provide differential digestion of the genomic DNA depending on the presence or absence of the polymorphism) may be performed. Arrays with nucleotide sequences of the present invention can be used to detect polymorphisms. The array can comprise modified nucleotide sequences of the present invention in order to detect the nucleotide sequences of the present invention. In the alternative, any one of the nucleotide sequences of the present invention can be placed on the array to detect changes from those sequences.

[0284] Alternatively a polymorphism resulting in a change in the amino acid sequence could also be detected by detecting a corresponding change in amino acid sequence of the protein, e.g., by an antibody specific to the variant sequence.

[0285] 4.10.20 Arthritis and Inflammation

[0286] The immunosuppressive effects of the compositions of the invention against rheumatoid arthritis is determined in an experimental animal model system. The experimental model system is adjuvant induced arthritis in rats, and the protocol is described by J. Holoshitz, et at., 1983, Science, 219:56, or by B. Waksman et al., 1963, Int. Arch. Allergy Appl. Immunol., 23:129. Induction of the disease can be caused by a single injection, generally intradermally, of a suspension of killed Mycobacterium tuberculosis in complete Freund's adjuvant (CFA). The route of injection can vary, but rats may be injected at the base of the tail with an adjuvant mixture. The polypeptide is administered in phosphate buffered solution (PBS) at a dose of about 1-5 mg/kg. The control consists of administering PBS only.

[0287] The procedure for testing the effects of the test compound would consist of intradermally injecting killed Mycobacterium tuberculosis in CFA followed by immediately administering the test compound and subsequent treatment every other day until day 24. At 14, 15, 18, 20, 22, and 24 days after injection of Mycobacterium CFA, an overall arthritis score may be obtained as described by J. Holoskitz above. An analysis of the data would reveal that the test compound would have a dramatic affect on the swelling of the joints as measured by a decrease of the arthritis score.

[0288] 4.11 Therapeutic Methods

[0289] The compositions (including polypeptide fragments, analogs, variants and antibodies or other binding partners or modulators including antisense polynucleotides) of the invention have numerous applications in a variety of therapeutic methods. Examples of therapeutic applications include, but are not limited to, those exemplified herein.

[0290] 4.11.1 Example

[0291] One embodiment of the invention is the administration of an effective amount of the polypeptides or other composition of the invention to individuals affected by a disease or disorder that can be modulated by regulating the peptides of the invention. While the mode of administration is not particularly important, parenteral administration is preferred. An exemplary mode of administration is to deliver an intravenous bolus. The dosage of the polypeptides or other composition of the invention will normally be determined by the prescribing physician. It is to be expected that the dosage will vary according to the age, weight, condition and response of the individual patient. Typically, the amount of polypeptide administered per dose will be in the range of about 0.01 μg/kg to 100 mg/kg of body weight, with the preferred dose being about 0.1 μg/kg to 10 mg/kg of patient body weight. For parenteral administration, polypeptides of the invention will be formulated in an injectable form combined with a pharmaceutically acceptable parenteral vehicle. Such vehicles are well known in the art and examples include water, saline, Ringer's solution, dextrose solution, and solutions consisting of small amounts of the human serum albumin. The vehicle may contain minor amounts of additives that maintain the isotonicity and stability of the polypeptide or other active ingredient. The preparation of such solutions is within the skill of the art.

[0292] 4.12 Pharmaceutical Formulations and Routes of Administration

[0293] A protein or other composition of the present invention (from whatever source derived, including without limitation from recombinant and non-recombinant sources and including antibodies and other binding partners of the polypeptides of the invention) may be administered to a patient in need, by itself, or in pharmaceutical compositions where it is mixed with suitable carriers or excipient(s) at doses to treat or ameliorate a variety of disorders. Such a composition may optionally contain (in addition to protein or other active ingredient and a carrier) diluents, fillers, salts, buffers, stabilizers, solubilizers, and other materials well known in the art. The term “pharmaceutically acceptable” means a non-toxic material that does not interfere with the effectiveness of the biological activity of the active ingredient(s). The characteristics of the carrier will depend on the route of administration. The pharmaceutical composition of the invention may also contain cytokines, lymphokines, or other hematopoietic factors such as M-CSF, GM-CSF, TNF, IL-1, IL-2, IL-3, IL-4, IL-5, IL-6, IL-7, IL-8, IL-9, IL-10, IL-11, IL-12, IL-13, IL-14, IL-15, IFN, TNF0, TNF1, TNF2, G-CSF, Meg-CSF, thrombopoietin, stem cell factor, and erythropoietin. In further compositions, proteins of the invention may be combined with other agents beneficial to the treatment of the disease or disorder in question. These agents include various growth factors such as epidermal growth factor (EGF), platelet-derived growth factor (PDGF), transforming growth factors (TGF-α and TGF-β), insulin-like growth factor (IGF), as well as cytokines described herein.

[0294] The pharmaceutical composition may further contain other agents which either enhance the activity of the protein or other active ingredient or complement its activity or use in treatment. Such additional factors and/or agents may be included in the pharmaceutical composition to produce a synergistic effect with protein or other active ingredient of the invention, or to minimize side effects. Conversely, protein or other active ingredient of the present invention may be included in formulations of the particular clotting factor, cytokine, lymphokine, other hematopoietic factor, thrombolytic or anti-thrombotic factor, or anti-inflammatory agent to minimize side effects of the clotting factor, cytokine, lymphokine, other hematopoietic factor, thrombolytic or anti-thrombotic factor, or anti-inflammatory agent (such as IL-IRa, IL-1 Hy1, IL-1 Hy2, anti-TNF, corticosteroids, immunosuppressive agents). A protein of the present invention may be active in multimers (e.g., heterodimers or homodimers) or complexes with itself or other proteins. As a result, pharmaceutical compositions of the invention may comprise a protein of the invention in such multimeric or complexed form.

[0295] As an alternative to being included in a pharmaceutical composition of the invention including a first protein, a second protein or a therapeutic agent may be concurrently administered with the first protein (e.g., at the same time, or at differing times provided that therapeutic concentrations of the combination of agents is achieved at the treatment site). Techniques for formulation and administration of the compounds of the instant application may be found in “Remington's Pharmaceutical Sciences,” Mack Publishing Co., Easton, PA, latest edition. A therapeutically effective dose further refers to that amount of the compound sufficient to result in amelioration of symptoms, e.g., treatment, healing, prevention or amelioration of the relevant medical condition, or an increase in rate of treatment, healing, prevention or amelioration of such conditions. When applied to an individual active ingredient, administered alone, a therapeutically effective dose refers to that ingredient alone. When applied to a combination, a therapeutically effective dose refers to combined amounts of the active ingredients that result in the therapeutic effect, whether administered in combination, serially or simultaneously.

[0296] In practicing the method of treatment or use of the present invention, a therapeutically effective amount of protein or other active ingredient of the present invention is administered to a mammal having a condition to be treated. Protein or other active ingredient of the present invention may be administered in accordance with the method of the invention either alone or in combination with other therapies such as treatments employing cytokines, lymphokines or other hematopoietic factors. When co-administered with one or more cytokines, lymphokines or other hematopoietic factors, protein or other active ingredient of the present invention may be administered either simultaneously with the cytokine(s), lymphokine(s), other hematopoietic factor(s), thrombolytic or anti-thrombotic factors, or sequentially. If administered sequentially, the attending physician will decide on the appropriate sequence of administering protein or other active ingredient of the present invention in combination with cytokine(s), lymphokine(s), other hematopoietic factor(s), thrombolytic or anti-thrombotic factors.

[0297] 4.12.1 Routes of Administration

[0298] Suitable routes of administration may, for example, include oral, rectal, transmucosal, or intestinal administration; parenteral delivery, including intramuscular, subcutaneous, intramedullary injections, as well as intrathecal, direct intraventricular, intravenous, intraperitoneal, intranasal, or intraocular injections. Administration of protein or other active ingredient of the present invention used in the pharmaceutical composition or to practice the method of the present invention can be carried out in a variety of conventional ways, such as oral ingestion, inhalation, topical application or cutaneous, subcutaneous, initraperitoneal, parenteral or intravenous injection. Intravenous administration to the patient is preferred.

[0299] Alternately, one may administer the compound in a local rather than systemic manner, for example, via injection of the compound directly into a arthritic joints or in fibrotic tissue, often in a depot or sustained release formulation. In order to prevent the scarring process frequently occurring as complication of glaucoma surgery, the compounds may be administered topically, for example, as eye drops. Furthermore, one may administer the drug in a targeted drug delivery system, for example, in a liposorne coated with a specific antibody, targeting, for example, arthritic or fibrotic tissue. The liposomes will be targeted to and taken up selectively by the afflicted tissue.

[0300] The polypeptides of the invention are administered by any route that delivers an effective dosage to the desired site of action. The determination of a suitable route of administration and an effective dosage for a particular indication is within the level of skill in the art. Preferably for wound treatment, one administers the therapeutic compound directly to the site. Suitable dosage ranges for the polypeptides of the invention can be extrapolated from these dosages or from similar studies in appropriate animal models. Dosages can then be adjusted as necessary by the clinician to provide maximal therapeutic benefit.

[0301] 4.12.2 Compositions/Formulations

[0302] Pharmaceutical compositions for use in accordance with the present invention thus may be formulated in a conventional manner using one or more physiologically acceptable carriers comprising excipients and auxiliaries which facilitate processing of the active compounds into preparations which can be used pharmaceutically. These pharmaceutical compositions may be manufactured in a manner that is itself known, e.g., by means of conventional mixing, dissolving, granulating, dragee-making, levigating, emulsifying, encapsulating, entrapping or lyophilizing processes. Proper formulation is dependent upon the route of administration chosen. When a therapeutically effective amount of protein or other active ingredient of the present invention is administered orally, protein or other active ingredient of the present invention will be in the form of a tablet, capsule, powder, solution or elixir. When administered in tablet form, the pharmaceutical composition of the invention may additionally contain a solid carrier such as a gelatin or an adjuvant. The tablet, capsule, and powder contain from about 5 to 95% protein or other active ingredient of the present invention, and preferably from about 25 to 90% protein or other active ingredient of the present invention. When administered in liquid form, a liquid carrier such as water, petroleum, oils of animal or plant origin such as peanut oil, mineral oil, soybean oil, or sesame oil, or synthetic oils may be added. The liquid form of the pharmaceutical composition may further contain physiological saline solution, dextrose or other saccharide solution, or glycols such as ethylene glycol, propylene glycol or polyethylene glycol., When administered in liquid form, the pharmaceutical composition contains from about 0.5 to 90% by weight of protein or other active ingredient of the present invention, and preferably from about 1 to 50% protein or other active ingredient of the present invention.

[0303] When a therapeutically effective amount of protein or other active ingredient of the present invention is administered by intravenous, cutaneous or subcutaneous injection, protein or other active ingredient of the present invention will be in the form of a pyrogen-free, parenterally acceptable aqueous solution. The preparation of such parenterally acceptable protein or other active ingredient solutions, having due regard to pH, isotonicity, stability, and the like, is within the skill in the art. A preferred pharmaceutical composition for intravenous, cutaneous, or subcutaneous injection should contain, in addition to protein or other active ingredient of the present invention, an isotonic velicle such as Sodium Chloride Injection, Ringer's Injection, Dextrose Injection, Dextrose and Sodium Chloride Injection, Lactated Ringer's Injection, or other vehicle as known in the art. The pharmaceutical composition of the present invention may also contain stabilizers, preservatives, buffers, antioxidants, or other additives known to those of skill in the art. For injection, the agents of the invention may be formulated in aqueous solutions, preferably in physiologically compatible buffers such as Hanks's solution, Ringer's solution, or physiological saline buffer. For transmucosal administration, penetrants appropriate to the barrier to be permeated are used in the formulation. Such penetrants are generally known in the art.

[0304] For oral administration, the compounds can be formulated readily by combining the active compounds with pharmaceutically acceptable carriers well lknown in the art. Such carriers enable the compounds of the invention to be formulated as tablets, pills, dragees, capsules, liquids, gels, syrups, slurries, suspensions and the like, for oral ingestion by a patient to be treated. Pharmaceutical preparations for oral use can be obtained from a solid excipient, optionally grinding a resulting mixture, and processing the mixture of granules, after adding suitable auxiliaries, if desired, to obtain tablets or dragee cores. Suitable excipients are, in particular, fillers such as sugars, including lactose, sucrose, mannitol, or sorbitol; cellulose preparations such as, for example, maize starch, wheat starch, rice starch, potato starch, gelatin, gum tragacanth, methyl cellulose, hydroxypropylmethyl-cellulose, sodium carboxymethylcellulose, and/or polyvinylpyrrolidone (PVP). If desired, disintegrating agents may be added, such as the cross-linked polyvinyl pyrrolidone, agar, or alginic acid or a salt thereof such as sodium alginate. Dragee cores are provided with suitable coatings. For this purpose, concentrated sugar solutions may be used, which may optionally contain gum arabic, talc, polyvinyl pyrrolidone, carbopol gel, polyethylene glycol, and/or titanium dioxide, lacquer solutions, and suitable organic solvents or solvent mixtures. Dyestuffs or pigments may be added to the tablets or dragee coatings for identification or to characterize different combinations of active compound doses.

[0305] Pharmaceutical preparations which can be used orally include push-fit capsules made of gelatin, as well as soft, sealed capsules made of gelatin and a plasticizer, such as glycerol or sorbitol. The push-fit capsules can contain the active ingredients in admixture with filler such as lactose, binders such as starches, and/or lubricants such as talc or magnesium stearate and, optionally, stabilizers. In soft capsules, the active compounds may be dissolved or suspended in suitable liquids, such as fatty oils, liquid paraffin, or liquid polyethylene glycols. In addition, stabilizers may be added. All formulations for oral administration should be in dosages suitable for such administration. For buccal administration, the compositions may take the form of tablets or lozenges formulated in conventional manner.

[0306] For administration by inhalation, the compounds for use according to the present invention are conveniently delivered in the form of an aerosol spray presentation from pressurized packs or a nebuliser, with the use of a suitable propellant, e.g., dichlorodifluoromethane, trichlorofluoromethane, dichlorotetrafluoroethane, carbon dioxide or other suitable gas. In the case of a pressurized aerosol the dosage unit may be determined by providing a valve to deliver a metered amount. Capsules and cartridges of, e.g., gelatin for use in an inhaler or insufflator may be formulated containing a powder mix of the compound and a suitable powder base such as lactose or starch. The compounds may be formulated for parenteral administration by injection, e.g., by bolus injection or continuous infusion. Formulations for injection may be presented in unit dosage form, e.g., in ampules or in multi-dose containers, with an added preservative. The compositions may take such forms as suspensions, solutions or emulsions in oily or aqueous vehicles, and may contain formulatory agents such as suspending, stabilizing and/or dispersing agents.

[0307] Pharmaceutical formulations for parenteral administration include aqueous solutions of the active compounds in water-soluble form. Additionally, suspensions of the active compounds may be prepared as appropriate oily injection suspensions. Suitable lipophilic solvents or vehicles include fatty oils such as sesame oil, or synthetic fatty acid esters, such as ethyl oleate or triglycerides, or liposomes. Aqueous injection suspensions may contain substances which increase the viscosity of the suspension, such as sodium carboxymethyl cellulose, sorbitol, or dextran. Optionally, the suspension may also contain suitable stabilizers or agents which increase the solubility of the compounds to allow for the preparation of highly concentrated solutions. Alternatively, the active ingredient may be in powder fonn for constitution with a suitable vehicle, e.g., sterile pyrogen-free water, before use.

[0308] The compounds may also be formulated in rectal compositions such as suppositories or retention enemas, e.g., containing conventional suppository bases such as cocoa butter or other glycerides. In addition to the formulations described previously, the compounds may also be formulated as a depot preparation. Such long acting formulations may be administered by implantation (for example subcutaneously or intramuscularly) or by intramuscular injection. Thus, for example, the compounds may be formulated with suitable polymeric or hydrophobic materials (for example as an emulsion in an acceptable oil) or ion exchange resins, or as sparingly soluble derivatives, for example, as a sparingly soluble salt.

[0309] A pharmaceutical carrier for the hydrophobic compounds of the invention is a co-solvent system comprising benzyl alcohol, a nonpolar surfactant, a water-miscible organic polymer, and an aqueous phase. The co-solvent system may be the VPD co-solvent system. VPD is a solution of 3% w/v benzyl alcohol, 8% w/v of the nonpolar surfactant polysorbate 80, and 65% w/v polyethylene glycol 300, made up to volume in absolute ethanol. The VPD co-solvent system (VPD:5W) consists of VPD diluted 1:1 with a 5% dextrose in water solution. This co-solvent system dissolves hydrophobic compounds well, and itself produces low toxicity upon systemic administration. Naturally, the proportions of a co-solvent system may be varied considerably without destroying its solubility and toxicity characteristics. Furthermore, the identity of the co-solvent components may be varied: for example, other low-toxicity nonpolar surfactants may be used instead of polysorbate 80; the fraction size of polyethylene glycol may be varied; other biocompatible polymers may replace polyethylene glycol, e.g. polyvinyl pyrrolidone; and other sugars or polysaccharides may substitute for dextrose. Alternatively, other delivery systems for hydrophobic pharmaceutical compounds may be employed. Liposomes and emulsions are well known examples of delivery vehicles or carriers for hydrophobic drugs. Certain organic solvents such as dimethylsulfoxide also may be employed, although usually at the cost of greater toxicity. Additionally, the compounds may be delivered using a sustained-release system, such as semipermeable matrices of solid hydrophobic polymers containing the therapeutic agent. Various types of sustained-release materials have been established and are well known by those skilled in the art. Sustained-release capsules may, depending on their chemical nature, release the compounds for a few weeks up to over 100 days. Depending on the chemical nature and the biological stability of the therapeutic reagent, additional strategies for protein or other active ingredient stabilization may be employed.

[0310] The pharmaceutical compositions also may comprise suitable solid or gel phase carriers or excipients. Examples of such carriers or excipients include but are not limited to calcium carbonate, calcium phosphate, various sugars, starches, cellulose derivatives, gelatin, and polymers such as polyethylene glycols. Many of the active ingredients of the invention may be provided as salts with pharmaceutically compatible counter ions. Such pharmaceutically acceptable base addition salts are those salts which retain the biological effectiveness and properties of the free acids and which are obtained by reaction with inorganic or organic bases such as sodium hydroxide, magnesium hydroxide, ammonia, trialkylamine, dialkylamine, monoalkylamine, dibasic amino acids, sodium acetate, potassium benzoate, triethanol amine and the like.

[0311] The pharmaceutical composition of the invention may be in the form of a complex of the protein(s) or other active ingredient(s) of present invention along with protein or peptide antigens. The protein and/or peptide antigen will deliver a stimulatory signal to both B and T lymphocytes. B lymphocytes will respond to antigen through their surface immunoglobulin receptor. T lymphocytes will respond to antigen through the T cell receptor (TCR) following presentation of the antigen by MHC proteins. MHC and structurally related proteins including those encoded by class I and class II MHC genes on host cells will serve to present the peptide antigen(s) to T lymphocytes. The antigen components could also be supplied as purified MHC-peptide complexes alone or with co-stimulatory molecules that can directly signal T cells. Alternatively antibodies able to bind surface immunoglobulin and other molecules on B cells as well as antibodies able to bind the TCR and other molecules on T cells can be combined with the pharmaceutical composition of the invention.

[0312] The pharmaceutical composition of the invention may be in the form of a liposome in which protein of the present invention is combined, in addition to other pharmaceutically acceptable carriers, with amphipathic agents such as lipids which exist in aggregated form as micelles, insoluble monolayers, liquid crystals, or lamellar layers in aqueous solution. Suitable lipids for liposomal formulation include, without limitation, monoglycerides, diglycerides, sulfatides, lysolecithins, phospholipids, saponin, bile acids, and the like. Preparation of such liposomal formulations is within the level of skill in the art, as disclosed, for example, in U.S. Pat. Nos. 4,235,871; 4,501,728; 4,837,028; and 4,737,323, all of which are incorporated herein by reference.

[0313] The amount of protein or other active ingredient of the present invention in the pharmaceutical composition of the present invention will depend upon the nature and severity of the condition being treated, and on the nature of prior treatments which the patient has undergone. Ultimately, the attending physician will decide the amount of protein or other active ingredient of the present invention with which to treat each individual patient. Initially, the attending physician will administer low doses of protein or other active ingredient of the present invention and observe the patient's response. Larger doses of protein or other active ingredient of the present invention may be administered until the optimal therapeutic effect is obtained for the patient, and at that point the dosage is not increased further. It is contemplated that the various pharmaceutical compositions used to practice the method of the present invention should contain about 0.01 μg to about 100 mg (preferably about 0.1 μg to about 10 mg, more preferably about 0.1 μg to about 1 mg) of protein or other active ingredient of the present invention per kg body weight. For compositions of the present invention which are useful for bone, cartilage, tendon or ligament regeneration, the therapeutic method includes administering the composition topically, systematically, or locally as an implant or device. When administered, the therapeutic composition for use in this invention is, of course, in a pyrogen-free, physiologically acceptable form. Further, the composition may desirably be encapsulated or injected in a viscous form for delivery to the site of bone, cartilage or tissue damage. Topical administration may be suitable for wound healing and tissue repair. Therapeutically useful agents other than a protein or other active ingredient of the invention which may also optionally be included in the composition as described above, may alternatively or additionally, be administered simultaneously or sequentially with the composition in the methods of the invention. Preferably for bone and/or cartilage formation, the composition would include a matrix capable of delivering the protein-containing or other active ingredient-containing composition to the site of bone and/or cartilage damage, providing a structure for the developing bone and cartilage and optimally capable of being resorbed into the body. Such matrices may be formed of materials presently in use for other implanted medical applications.

[0314] The choice of matrix material is based on biocompatibility, biodegradability, mechanical properties, cosmetic appearance and interface properties. The particular application of the compositions will define the appropriate formulation. Potential matrices for the compositions may be biodegradable and chemically defined calcium sulfate, tricalcium phosphate, hydroxyapatite, polylactic acid, polyglycolic acid and polyanhydrides. Other potential materials are biodegradable and biologically well-defined, such as bone or dermal collagen. Further matrices are comprised of pure proteins or extracellular matrix components. Other potential matrices are nonbiodegradable and chemically defined, such as sintered hydroxyapatite, bioglass, aluminates, or other ceramics. Matrices may be comprised of combinations of any of the above-mentioned types of material, such as polylactic acid and hydroxyapatite or collagen and tricalcium phosphate. The bioceramics may be altered in composition, such as in calcium-aluminate-phosphate and processing to alter pore size, particle size, particle shape, and biodegradability. Presently preferred is a 50:50 (mole weight) copolymer of lactic acid and glycolic acid in the form of porous particles having diameters ranging from 150 to 800 microns. In some applications, it will be useful to utilize a sequestering agent, such as carboxymethyl cellulose or autologous blood clot, to prevent the protein compositions from disassociating from the matrix.

[0315] A preferred family of sequestering agents is cellulosic materials such as alkylcelluloses (including hydroxyalkylcelluloses), including methylcellulose, ethylcellulose, hydroxyethylcellulose, hydroxypropylcellulose, hydroxypropyl-methylcellulose, and carboxymethylcellulose, the most preferred being cationic salts of carboxymethylcellulose (CMC). Other preferred sequestering agents include hyaluronic acid, sodium alginate, poly(ethylene glycol), polyoxyethylene oxide, carboxyvinyl polymer and poly(vinyl alcohol). The amount of sequestering agent useful herein is 0.5-20 wt %, preferably 1-10 wt % based on total formulation weight, which represents the amount necessary to prevent desorption of the protein from the polymer matrix and to provide appropriate handling of the composition, yet not so much that the progenitor cells are prevented from infiltrating the matrix, thereby providing the protein the opportunity to assist the osteogenic activity of the progenitor cells. In further compositions, proteins or other active ingredients of the invention maybe combined with other agents beneficial to the treatment of the bone and/or cartilage defect, wound, or tissue in question. These agents include various growth factors such as epidermal growth factor (EGF), platelet derived growth factor (PDGF), transforming growth factors (TGF-α and TGF-β), and insulin-like growth factor (IGF).

[0316] The therapeutic compositions are also presently valuable for veterinary applications. Particularly domestic animals and thoroughbred horses, in addition to humans, are desired patients for such treatment with proteins or other active ingredients of the present invention. The dosage regimen of a protein-containing pharmaceutical composition to be used in tissue regeneration will be detennined by the attending physician considering various factors which modify the action of the proteins, e.g., amount of tissue weight desired to be formed, the site of damage, the condition of the damaged tissue, the size of a wound, type of damaged tissue (e.g., bone), the patient's age, sex, and diet, the severity of any infection, time of administration and other clinical factors. The dosage may vary with the type of matrix used in the reconstitution and with inclusion of other proteins in the pharmaceutical composition. For example, the addition of other known growth factors, such as IGF I (insulin like growth factor I), to the final composition, may also effect the dosage. Progress can be monitored by periodic assessment of tissue/bone growth and/or repair, for example, X-rays, histomorphometric determinations and tetracycline labeling.

[0317] Polynucleotides of the present invention can also be used for gene therapy. Such polynucleotides can be introduced either in vivo or ex vivo into cells for expression in a mammalian subject. Polynucleotides of the invention may also be administered by other known methods for introduction of nucleic acid into a cell or organism (including, without limitation, in the form of viral vectors or naked DNA). Cells may also be cultured ex vivo in the presence of proteins of the present invention in order to proliferate or to produce a desired effect on or activity in such cells. Treated cells can then be introduced in vivo for therapeutic purposes.

[0318] 4.12.3 Effective Dosage

[0319] Pharmaceutical compositions suitable for use in the present invention include compositions wherein the active ingredients are contained in an effective amount to achieve its intended purpose. More specifically, a therapeutically effective amount means an amount effective to prevent development of or to alleviate the existing symptoms of the subject being treated. Determination of the effective amount is well within the capability of those skilled in the art, especially in light of the detailed disclosure provided herein. For any compound used in the method of the invention, the therapeutically effective dose can be estimated initially from appropriate in vitro assays. For example, a dose can be formulated in animal models to achieve a circulating concentration range that can be used to more accurately determine useful doses in humans. For example, a dose can be formulated in animal models to achieve a circulating concentration range that includes the IC₅₀ as determined in cell culture (i.e., the concentration of the test compound which achieves a half-maximal inhibition of the protein's biological activity). Such information can be used to more accurately determine useful doses in humans.

[0320] A therapeutically effective dose refers to that amount of the compound that results in amelioration of symptoms or a prolongation of survival in a patient. Toxicity and therapeutic efficacy of such compounds can be determined by standard pharmaceutical procedures in cell cultures or experimental animals, e.g., for determining the LD₅₀ (the dose lethal to 50% of the population) and the ED₅₀ (the dose therapeutically effective in 50% of the population). The dose ratio between toxic and therapeutic effects is the therapeutic index and it can be expressed as the ratio between LD₅₀ and ED₅₀. Compounds which exhibit high therapeutic indices are preferred. The data obtained from these cell culture assays and animal studies can be used in formulating a range of dosage for use in human. The dosage of such compounds lies preferably within a range of circulating concentrations that include the ED₅₀ with little or no toxicity. The dosage may vary within this range depending upon the dosage form employed and the route of administration utilized. The exact formulation, route of administration and dosage can be chosen by the individual physician in view of the patient's condition. See, e.g., Fingl et al., 1975, in “The Pharmacological Basis of Therapeutics”, Ch. 1 p. 1. Dosage amount and interval may be adjusted individually to provide plasma levels of the active moiety which are sufficient to maintain the desired effects, or minimal effective concentration (MEC). The MEC will vary for each compound but can be estimated from in vitro data. Dosages necessary to achieve the MEC will depend on individual characteristics and route of administration. However, BPLC assays or bioassays can be used to determine plasma concentrations.

[0321] Dosage intervals can also be determined using MEC value. Compounds should be administered using a regimen which maintains plasma levels above the MEC for 10-90% of the time, preferably between 30-90% and most preferably between 50-90%. In cases of local administration or selective uptake, the effective local concentration of the drug may not be related to plasma concentration.

[0322] An exemplary dosage regimen for polypeptides or other compositions of the invention will be in the range of about 0.01 μg/kg to 100 mg/kg of body weight daily, with the preferred dose being about 0.1 μg/kg to 25 mg/kg of patient body weight daily, varying in adults and children. Dosing may be once daily, or equivalent doses may be delivered at longer or shorter intervals.

[0323] The amount of composition administered will, of course, be dependent on the subject being treated, on the subject's age and weight, the severity of the affliction, the manner of administration and the judgment of the prescribing physician.

[0324] 4.12.4 Packaging

[0325] The compositions may, if desired, be presented in a pack or dispenser device which may contain one or more unit dosage forms containing the active ingredient. The pack may, for example, comprise metal or plastic foil, such as a blister pack. The pack or dispenser device may be accompanied by instructions for administration. Compositions comprising a compound of the invention formulated in a compatible pharmaceutical carrier may also be prepared, placed in an appropriate container, and labeled for treatment of an indicated condition.

[0326] 4.13 Antibodies

[0327] Also included in the invention are antibodies to proteins, or fragments of proteins of the invention. The term “antibody” as used herein refers to imnmunoglobulin molecules and immunologically active portions of immunoglobulin (Ig) molecules, i.e., molecules that contain an antigen-binding site that specifically binds (immunoreacts with) an antigen. Such antibodies include, but are not limited to, polyclonal, monoclonal, chimeric, single chain, Fab, Fab′ and F_{(ab′)2} fragments, and an F_{ab} expression library. In general, an antibody molecule obtained from humans relates to any of the classes IgG, IgM, IgA, IgE and IgD, which differ from one another by the nature of the heavy chain present in the molecule. Certain classes have subclasses as well, such as IgG₁, IgG₂, and others. Furthermore, in humans, the light chain may be a kappa chain or a lambda chain. Reference herein to antibodies includes a reference to all such classes, subclasses and types of human antibody species.

[0328] An isolated related protein of the invention may be intended to serve as an antigen, or a portion or fragment thereof, and additionally can be used as an immunogen to generate antibodies that immunospecifically bind the antigen, using standard techniques for polygonal and monoclonal antibody preparation. The full-length protein can be used or, alternatively, the invention provides antigenic peptide fragments of the antigen for use as imnmunogens. An antigenic peptide fragment comprises at least 6 amino acid residues of the amino acid sequence of the full length protein, such as an amino acid sequence shown in SEQ ID NO:, 125-248, or 331-412, or Tables 3, 5, 6, or 8, and encompasses an epitope thereof such that an antibody raised against the peptide forms a specific immune complex with the fall length protein or with any fragment that contains the epitope. Preferably, the antigenic peptide comprises at least 10 amino acid residues, or at least 15 amino acid residues, or at least 20 amino acid residues, or at least 30 amino acid residues. Preferred epitopes encompassed by the antigenic peptide are regions of the protein that are located on its surface; commonly these are hydrophilic regions.

[0329] In certain embodiments of the invention, at least one epitope encompassed by the antigenic peptide is a surface region of the protein, e.g., a hydrophilic region. A hydrophobicity analysis of the human related protein sequence will indicate which regions of a related protein are particularly hydrophilic and, therefore, are likely to encode surface residues useful for targeting antibody production. As a means for targeting antibody production, hydropathy plots showing regions of hydroplilicity and hydrophobicity may be generated by any method well known in the art, including, for example, the Kyte Doolittle or the Hopp Woods methods, either with or without Fourier transformation. See, e.g., Hopp and Woods, 1981, Proc. Nat. Acad. Sci. USA 78: 3824-3828; Kyte and Doolittle 1982, J. Mol. Biol. 157: 105-142, each of which is incorporated herein by reference in its entirety. Antibodies that are specific for one or more domains within an antigenic protein, or derivatives, fragments, analogs or homologs thereof, are also provided herein.

[0330] A protein of the invention, or a derivative, fragment, analog, homolog or ortholog thereof, may be utilized as an immunogen in the generation of antibodies that inmmunospecifically bind these protein components.

[0331] The term “specific for” indicates that the variable regions of the antibodies of the invention recognize and bind polypeptides of the invention exclusively (i.e., able to distinguish the polypeptide of the invention from other similar polypeptides despite sequence identity, homology, or similarity found in the family of polypeptides), but may also interact with other proteins (for example, S. aureus protein A or other antibodies in ELISA techniques) thlrough interactions with sequences outside the variable region of the antibodies, and in particular, in the constant region of the molecule. Screening assays to determine binding specificity of an antibody of the invention are well known and routinely practiced in the art. For a comprehensive discussion of such assays, see Harlow et al. (Eds), Antibodies A Laboratory Manual; Cold Spring Harbor Laboratory; Cold Spring Harbor, N.Y. (1988), Chapter 6. Antibodies that recognize and bind fragments of the polypeptides of the invention are also contemplated, provided that the antibodies are first and foremost specific for, as defined above, full-length polypeptides of the invention. As with antibodies that are specific for fall length polypeptides of the invention, antibodies of the invention that recognize fragments are those which can distinguish polypeptides from the same family of polypeptides despite inherent sequence identity, homology, or similarity found in the family of proteins.

[0332] Antibodies of the invention are useful for, for example, therapeutic purposes (by modulating activity of a polypeptide of the invention), diagnostic purposes to detect or quantitate a polypeptide of the invention, as well as purification of a polypeptide of the invention. Kits comprising an antibody of the invention for any of the purposes described herein are also comprehended. In general, a kit of the invention also includes a control antigen for which the antibody is immunospecific. The invention further provides a hybridoma that produces an antibody according to the invention. Antibodies of the invention are useful for detection and/or purification of the polypeptides of the invention.

[0333] Monoclonal antibodies binding to the protein of the invention may be useful diagnostic agents for the immunodetection of the protein. Neutralizing monoclonal antibodies binding to the protein may also be useful therapeutics for both conditions associated with the protein and also in the treatment of some forms of cancer where abnormal expression of the protein is involved. In the case of cancerous cells or leukemic cells, neutralizing monoclonal antibodies against the protein may be useful in detecting and preventing the metastatic spread of the cancerous cells, which may be mediated by the protein.

[0334] The labeled antibodies of the present invention can be used for in vitro, in vivo, and in situ assays to identify cells or tissues in which a fragment of the polypeptide of interest is expressed. The antibodies may also be used directly in therapies or other diagnostics. The present invention further provides the above-described antibodies immobilized on a solid support. Examples of such solid supports include plastics such as polycarbonate, complex carbohydrates such as agarose and Sepharose®, acrylic resins and such as polyacrylamide and latex beads. Techniques for coupling antibodies to such solid supports are well known in the art (Weir, D. M. et al., “Handbook of Experimental Immunology” 4th Ed., Blackwell Scientific Publications, Oxford, England, Chapter 10 (1986); Jacoby, W. D. et al., Meth. Enzym. 34 Academic Press, N.Y. (1974)). The immobilized antibodies of the present invention can be used for in vitro, in vivo, and in situ assays as well as for immuno-affinity purification of the proteins of the present invention.

[0335] Various procedures known within the art may be used for the production of polyclonal or monoclonal antibodies directed against a protein of the invention, or against derivatives, fragments, analogs homologs or orthologs thereof (see, for example, Antibodies: A Laboratory Manual, Harlow E, and Lane D, 1988, Cold Spring Harbor Laboratory Press, Cold Spring Harbor, N.Y., incorporated herein by reference). Some of these antibodies are discussed below.

[0336] 4.13.1 Polyclonal Antibodies

[0337] For the production of polyclonal antibodies, various suitable host animals (e.g., rabbit, goat, mouse or other mammal) may be immunized by one or more injections with the native protein, a synthetic variant thereof, or a derivative of the foregoing. An appropriate immunogenic preparation can contain, for example, the naturally occurring immunogenic protein, a chemically synthesized polypeptide representing the immunogenic protein, or a recombinantly expressed immunogenic protein. Furthermore, the protein may be conjugated to a second protein known to be immunogenic in the mammal being immunized. Examples of such immunogenic proteins include but are not limited to keyhole limpet hemocyanin, serum albumin, bovine thyroglobulin, and soybean trypsin inhibitor. The preparation can further include an adjuvant. Various adjuvants used to increase the immunological response include, but are not limited to, Freund's (complete and incomplete), mineral gels (e.g., aluminum hydroxide), surface-active substances (e.g., lysolecithin, pluronic polyols, polyanions, peptides, oil emulsions, dinitrophenol, etc.), adjuvants usable in humans such as Bacille Calmette-Guerin and Corynebacterium parvum, or similar immunostimulatory agents. Additional examples of adjuvants that can be employed include MPL-TDM adjuvant (monophosphoryl Lipid A, synthetic trehalose dicorynomycolate).

[0338] The polyclonal antibody molecules directed against the immunogenic protein can be isolated from the mammal (e.g., from the blood) and further purified by well known techniques, such as affinity chromatography using protein A or protein G, which provide primarily the IgG fraction of immune serum. Subsequently, or alternatively, the specific antigen which is the target of the immunoglobulin sought, or an epitope thereof, may be immobilized on a column to purify the immune specific antibody by immunoaffinity chromatography. Purification of immunoglobulins is discussed, for example, by D. Wilkinson (The Scientist, published by The Scientist, Inc., Philadelphia Pa., Vol. 14, No. 8 (Apr. 17, 2000), pp. 25-28).

[0339] 4.13.2 Monoclonal Antibodies

[0340] The term “monoclonal antibody” (MAb) or “monoclonal antibody composition”, as used herein, refers to a population of antibody molecules that contain only one molecular species of antibody molecule consisting of a unique light chain gene product and a unique heavy chain gene product. In particular, the complementarity determining regions (CDRs) of the monoclonal antibody are identical in all the molecules of the population. MAbs thus contain an antigen-binding site capable of immunoreacting with a particular epitope of the antigen characterized by a unique binding affinity for it.

[0341] Monoclonal antibodies can be prepared using hybridoma methods, such as those described by Kohler and Milstein, Nature, 256, 495 (1975). In a hybridoma method, a mouse, hamster, or other appropriate host animal, is typically immunized with an immunizing agent to elicit lymphocytes that produce or are capable of producing antibodies that will specifically bind to the immunizing agent. Alternatively, the lymphocytes can be immunized in vitro.

[0342] The immunizing agent will typically include the protein antigen, a fragment thereof or a fusion protein thereof. Generally, either peripheral blood lymphocytes are used if cells of human origin are desired, or spleen cells or lymph node cells are used if non-human mammalian sources are desired. The lymphocytes are then fused with an immortalized cell line using a suitable fusing agent, such as polyethylene glycol, to form a hybridoma cell (Goding, Monoclonal Antibodies: Principles and Practice, Academic Press, (1986) pp. 59-103). Immortalized cell lines are usually transformed mammalian cells, particularly myeloma cells of rodent, bovine and human origin. Usually, rat or mouse myeloma cell lines are employed. The hybridoma cells can be cultured in a suitable culture medium that preferably contains one or more substances that inhibit the growth or survival of the unfused, immortalized cells. For example, if the parental cells lack the enzyme hypoxanthine guanine phosphoribosyl transferase (HGPRT or HPRT), the culture medium for the hybridomas typically will include hypoxanthine, aminopterin, and thymidine (“HAT medium”), which substances prevent the growth of HGPRT-deficient cells.

[0343] Preferred immortalized cell lines are those that fuse efficiently, support stable high level expression of antibody by the selected antibody-producing cells, and are sensitive to a medium such as HAT medium. More preferred immortalized cell lines are murine myeloma lines, which can be obtained, for instance, from the Salk Institute Cell Distribution Center, San Diego, Calif. and the American Type Culture Collection, Manassas, Va. Human myeloma and mouse-human heteromyeloma cell lines also have been described for the production of human monoclonal antibodies (Kozbor, J. Immunol., 133:3001 (1984); Brodeur et al., Monoclonal Antibody Production Techniques and Applications, Marcel Dekker, Inc., New York, (1987) pp. 51-63).

[0344] The culture medium in which the hybridoma cells are cultured can then be assayed for the presence of monoclonal antibodies directed against the antigen. Preferably, the binding specificity of monoclonal antibodies produced by the hybridoma cells is determined by immunoprecipitation or by an in vitro binding assay, such as radioimmunoassay (RIA) or enzyme-linked immunoabsorbent assay (ELISA). Such techniques and assays are known in the art. The binding affinity of the monoclonal antibody can, for example, be determined by the Scatchard analysis of Munson and Pollard, Anal. Biochem., 107, 220 (1980). Preferably, antibodies having a high degree of specificity and a high binding affinity for the target antigen are isolated.

[0345] After the desired hybridoma cells are identified, the clones can be subcloned by limiting dilution procedures and grown by standard methods. Suitable culture media for this purpose include, for example, Dulbecco's Modified Eagle's Medium and RPMI-1640 medium. Alternatively, the hybridoma cells can be grown in vivo as ascites in a mammal.

[0346] The monoclonal antibodies secreted by the subdlones can be isolated or purified from the culture medium or ascites fluid by conventional immunoglobulin purification procedures such as, for example, protein A-Sepharose, hydroxylapatite chromatography, gel electrophoresis, dialysis, or affinity chromatography.

[0347] The monoclonal antibodies can also be made by recombinant DNA methods, such as those described in U.S. Pat. No. 4,816,567. DNA encoding the monoclonal antibodies of the invention can be readily isolated and sequenced using conventional procedures (e.g., by using oligonucleotide probes that are capable of binding specifically to genes encoding the heavy and light chains of murine antibodies). The hybridoma cells of the invention serve as a preferred source of such DNA. Once isolated, the DNA can be placed into expression vectors, which are then transfected into host cells such as simian COS cells, Chinese hamster ovary (CHO) cells, or myeloma cells that do not otherwise produce immunoglobulin protein, to obtain the synthesis of monoclonal antibodies in the recombinant host cells. The DNA also can be modified, for example, by substituting the coding sequence for human heavy and light chain constant domains in place of the homologous murine sequences (U.S. Pat. No. 4,816,567; Morrison, Nature 368, 812-13 (1994)) or by covalently joining to the immunoglobulin coding sequence all or part of the coding sequence for a non-immunoglobulin polypeptide. Such a non-immunoglobulin polypeptide can be substituted for the constant domains of an antibody of the invention, or can be substituted for the variable domains of one antigen-combining site of an antibody of the invention to create a chimeric bivalent antibody.

[0348] 4.13.3 Humanized Antibodies

[0349] The antibodies directed against the protein antigens of the invention can further comprise humanized antibodies or human antibodies. These antibodies are suitable for administration to humans without engendering an immune response by the human against the administered immunoglobulin. Humanized forms of antibodies are chimeric immunoglobulins, immunoglobulin chains or fragments thereof (such as Fv, Fab, Fab′, F(ab′)₂ or other antigen-binding subsequences of antibodies) that are principally comprised of the sequence of a human immunoglobulin, and contain minimal sequence derived from a non-human immunoglobulin. Humanization can be performed following the method of Winter and co-workers (Jones et al., Nature, 321, 522-525 (1986); Riechmann et al., Nature, 332, 323-327 (1988); Verhoeyen et al., Science, 239, 1534-1536 (1988)), by substituting rodent CDRs or CDR sequences for the corresponding sequences of a human antibody. (See also U.S. Pat. No. 5,225,539). In some instances, Fv framework residues of the human immunoglobulin are replaced by corresponding non-human residues. Humanized antibodies can also comprise residues that are found neither in the recipient antibody nor in the imported CDR or framework sequences. In general, the humanized antibody will comprise substantially all of at least one, and typically two, variable domains, in which all or substantially all of the CDR regions correspond to those of a non-human immunoglobulin and all or substantially all of the framework regions are those of a human immunoglobulin consensus sequence. The humanized antibody optimally also will comprise at least a portion of an immunoglobulin constant region (Fc), typically that of a human immunoglobulin (Jones et al., 1986; Riechmann et al., 1988; and Presta, Curr. Op. Struct. Biol., 2, 593-596 (1992)).

[0350] 4.13.4 Human Antibodies

[0351] Fully human antibodies relate to antibody molecules in which essentially the entire sequences of both the light chain and the heavy chain, including the CDRs, arise from human genes. Such antibodies are termed “human antibodies”, or “fully human antibodies” herein. Human monoclonal antibodies can be prepared by the trioma technique; the human B-cell hybridoma technique (see Kozbor, et al., 1983 Immunol Today 4: 72) and the EBV hybridoma technique to produce human monoclonal antibodies (see Cole, et al., 1985 In: Monoclonal Antibodies and Cancer Therapy, Alan R. Liss, Inc., pp. 77-96). Human monoclonal antibodies may be utilized in the practice of the present invention and may be produced by using human hybridomas (see Cote, et al., 1983. Proc Natl Acad Sci USA 80, 2026-2030) or by transforming human B-cells with Epstein Barr Virus in vitro (see Cole, et al., 1985 In: Monoclonal Antibodies and Cancer Therapy, Alan R. Liss, Inc., pp. 77-96).

[0352] In addition, human antibodies can also be produced using additional techniques, including phage display libraries (Hoogenboom and Winter, J. Mol. Biol., 227, 381 (1991); Marks et al., J. Mol. Biol., 222:581 (1991)). Similarly, human antibodies can be made by introducing human immunoglobulin loci into transgenic animals, e.g., mice in which the endogenous immunoglobulin genes have been partially or completely inactivated. Upon challenge, human antibody production is observed, which closely resembles that seen in humans in all respects, including gene rearrangement, assembly, and antibody repertoire. This approach is described, for example, in U.S. Pat. Nos. 5,545,807; 5,545,806; 5,569,825; 5,625,126; 5,633,425; 5,661,016, and in Marks et al. (BiolTechnology 10, 779-783 (1992)); Lonberg et al. (Nature 368, 856-859 (1994)); Morrison (Nature 368, 812-13 (1994)); Fishwild et al, (Nature Biotechnology 14, 845-51 (1996)); Neuberger (Nature Biotechnology 14, 826 (1996)); and Lonberg and Huszar (Intern. Rev. Immunol. 13, 65-93 (1995)).

[0353] Human antibodies may additionally be produced using transgenic nonhuman animals that are modified so as to produce fully human antibodies rather than the animal's endogenous antibodies in response to challenge by an antigen. (See PCT publication WO94/02602). The endogenous genes encoding the heavy and light immunoglobulin chains in the nonhuman host have been incapacitated, and active loci encoding human heavy and light chain immunoglobulins are inserted into the host's genome. The human genes are incorporated, for example, using yeast artificial chromosomes containing the requisite human DNA segments. An animal which provides all the desired modifications is then obtained as progeny by crossbreeding intermediate transgenic animals containing fewer than the full complement of the modifications. The preferred embodiment of such a nonhuman animal is a mouse, and is termed the Xenomouse™ as disclosed in PCT publications WO 96/33735 and WO 96/34096. This animal produces B cells that secrete fully human immunoglobulins. The antibodies can be obtained directly from the animal after immunization with an immunogen of interest, as, for example, a preparation of a polyclonal antibody, or alternatively from immortalized B cells derived from the animal, such as hybridomas producing monoclonal antibodies. Additionally, the genes encoding the immunoglobulins with human variable regions can be recovered and expressed to obtain the antibodies directly, or can be firther modified to obtain analogs of antibodies such as, for example, single chain Fv molecules.

[0354] An example of a method of producing a nonhuman host, exemplified as a mouse, lacking expression of an endogenous immunoglobulin heavy chain is disclosed in U.S. Pat. No. 5,939,598. It can be obtained by a method including deleting the J segment genes from at least one endogenous heavy chain locus in an embryonic stem cell to prevent rearrangement of the locus and to prevent formation of a transcript of a rearranged immunoglobulin heavy chain locus, the deletion being effected by a targeting vector containing a gene encoding a selectable marker; and producing from the embryonic stem cell a transgenic mouse whose somatic and germ cells contain the gene encoding the selectable marker.

[0355] A method for producing an antibody of interest, such as a human antibody, is disclosed in U.S. Pat. No. 5,916,771. It includes introducing an expression vector that contains a nucleotide sequence encoding a heavy chain into one mammalian host cell in culture, introducing an expression vector containing a nucleotide sequence encoding a light chain into another mammalian host cell, and fusing the two cells to form a hybrid cell. The hybrid cell expresses an antibody containing the heavy chain and the light chain.

[0356] In a further improvement on this procedure, a method for identifying a clinically relevant epitope on an immunogen, and a correlative method for selecting an antibody that binds immunospecifically to the relevant epitope with high affinity, are disclosed in PCT publication WO 99/53049.

[0357] 4.13.5 FAB Fragments and Single Chain Antibodies

[0358] According to the invention, techniques can be adapted for the production of single-chain antibodies specific to an antigenic protein of the invention (see e.g., U.S. Pat. No. 4,946,778). In addition, methods can be adapted for the construction of F_{ab} expression libraries (see e.g., Huse, et al., 1989 Science 246, 1275-1281) to allow rapid and effective identification of monoclonal F_{ab} fragments with the desired specificity for a protein or derivatives, fragments, analogs or homologs thereof. Antibody fragments that contain the idiotypes to a protein antigen may be produced by teclniques known in the art including, but not limited to: (i) an F_{(ab′)2} fragment produced by pepsin digestion of an antibody molecule; (ii) an F_{ab} fragment generated by reducing the disulfide bridges of an F_{(ab′)2} fragment; (iii) an Fab fragment generated by the treatment of the antibody molecule with papain and a reducing agent and (iv) Fᵥ fragments.

[0359] 4.13.6 Bispecific Antibodies

[0360] Bispecific antibodies are monoclonal, preferably human or humanized, antibodies that have binding specificities for at least two different antigens. In the present case, one of the binding specificities is for an antigenic protein of the invention. The second binding target is any other antigen, and advantageously is a cell-surface protein or receptor or receptor subunit.

[0361] Methods for making bispecific antibodies are known in the art. Traditionally, the recombinant production of bispecific antibodies is based on the co-expression of two immunoglobulin heavy-chain/light-chain pairs, where the two heavy chains have different specificities (Milstein and Cuello, Nature, 305, 537-539 (1983)). Because of the random assortment of immunoglobulin heavy and light chains, these hybridomas (quadromas) produce a potential mixture of ten different antibody molecules, of which only one has the correct bispecific structure. The purification of the correct molecule is usually accomplished by affinity chromatography steps. Similar procedures are disclosed in WO 93/08829, published 13 May 1993, and in Traunecker et al., 1991 EMBO J., 10, 3655-3659.

[0362] Antibody variable domains with the desired binding specificities (antibody-antigen combining sites) can be fused to immunoglobulin constant domain sequences. The fusion preferably is with an immunoglobulin heavy-chain constant domain, comprising at least part of the hinge, CH2, and CH3 regions. It is preferred to have the first heavy-chain constant region (CH1) containing the site necessary for light-chain binding present in at least one of the fusions. DNAs encoding the immunoglobulin heavy-chain fusions and, if desired, the immunoglobulin light chain, are inserted into separate expression vectors, and are co-transfected into a suitable host organism. For further details of generating bispecific antibodies see, for example, Suresh et al., Methods in Enzymology, 121, 210 (1986).

[0363] According to another approach described in WO 96/27011, the interface between a pair of antibody molecules can be engineered to maximize the percentage of heterodimers that are recovered from recombinant cell culture. The preferred interface comprises at least a part of the CH3 region of an antibody constant domain. In this method, one or more small amino acid side chains from the interface of the first antibody molecule are replaced with larger side chains (e.g. tyrosine or tryptophan). Compensatory “cavities” of identical or similar size to the large side chain(s) are created on the interface of the second antibody molecule by replacing large amino acid side chains with smaller ones (e.g. alanine or threonine). This provides a mechanism for increasing the yield of the heterodimer over other unwanted enid-products such as homodimers.

[0364] Bispecific antibodies can be prepared as full-length antibodies or antibody fragments (e.g. F(ab′)₂ bispecific antibodies). Techniques for generating bispecific antibodies from antibody fragments have been described in the literature. For example, bispecific antibodies can be prepared using chemical linkage. Bremnan et al., Science 229, 81 (1985) describe a procedure wherein intact antibodies are proteolytically cleaved to generate F(ab′)₂ fragments. These fragments are reduced in the presence of the dithiol complexing agent sodium arsenite to stabilize vicinal dithiols and prevent intermolecular disulfide formation. The Fab′ fragments generated are then converted to thionitrobenzoate (TNB) derivatives. One of the Fab′-TNB derivatives is then reconverted to the Fab′-thiol by reduction with mercaptoethylamine and is mixed with an equimolar amount of the other Fab′-TNB derivative to form the bispecific antibody. The bispecific antibodies produced can be used as agents for the selective immobilization of enzymes.

[0365] Additionally, Fab′ fragments can be directly recovered from E. coli and chemically coupled to form bispecific antibodies. Shalaby et al., J. Exp. Med. 175, 217-225 (1992) describe the production of a fully humanized bispecific antibody F(ab′)₂ molecule. Each Fab′ fragmnent was separately secreted from E. coli and subjected to directed chemical coupling in vitro to form the bispecific antibody. The bispecific antibody thus formed was able to bind to cells overexpressing the ErbB2 receptor and normal human T cells, as well as trigger the lytic activity of human cytotoxic lymphocytes against human breast tumor targets.

[0366] Various techniques for making and isolating bispecific antibody fragments directly from recombinant cell culture have also been described. For example, bispecific antibodies have been produced using leucine zippers. Kostelny et al., J. Immunol. 148(5), 1547-1553 (1992). The leucine zipper peptides from the Fos and Jun proteins were linked to the Fab′ portions of two different antibodies by gene fusion. The antibody homodimers were reduced at the hinge region to form monomers and then re-oxidized to form the antibody heterodimers. This method can also be utilized for the production of antibody homodimers. The “diabody” technology described by Hollinger et al., Proc. Natl. Acad. Sci. USA 90, 6444-6448 (1993) has provided an alternative mechanism for making bispecific antibody fragments. The fragments comprise a heavy-chain variable domain (V_{H}) coimected to a light-chain variable domain (V_{L}) by a linker which is too short to allow pairing between the two domains on the same chain. Accordingly, the V_{H} and V_{L} domains of one fragment are forced to pair with the complementary V_{L} and V_{H} domains of another fragment, thereby forming two antigen-binding sites. Another strategy for making bispecific antibody fragments by the use of single-chain Fv (sFv) dimers has also been reported. See, Gruber et al., J. Immunol. 152, 5368 (1994).

[0367] Antibodies with more than two valencies are contemplated. For example, trispecific antibodies can be prepared. Tutt et al., J. Immunol. 147, 60 (1991).

[0368] Exemplary bispecific antibodies can bind to two different epitopes, at least one of which originates in the protein antigen of the invention. Alternatively, an anti-antigenic arm of an immunoglobulin molecule can be combined with an arm which binds to a triggering molecule on a leukocyte such as a T-cell receptor molecule (e.g. CD2, CD3, CD28, or B7), or Fc receptors for IgG (FcγR), such as Fc-γRI (CD64), Fc′γRII (CD32) and FcγRIII (CD16) so as to focus cellular defense mechanisms to the cell expressing the particular antigen. Bispecific antibodies can also be used to direct cytotoxic agents to cells which express a particular antigen. These antibodies possess an antigen-binding arm and an arm which binds a cytotoxic agent or a radionuclide chelator, such as EOTUBE, DPTA, DOTA, or TETA. Another bispecific antibody of interest binds the protein antigen described herein and further binds tissue factor (TF).

[0369] 4.13.7 Heteroconjugate Antibodies

[0370] Heteroconjugate antibodies are also within the scope of the present invention. Heteroconjugate antibodies are composed of two covalently joined antibodies. Such antibodies have, for example, been proposed to target immune system cells to unwanted cells (U.S. Pat. No. 4,676,980), and for treatment of HIV infection (WO 91/00360; WO 92/200373; EP 03089). It is contemplated that the antibodies can be prepared in vitro using known methods in synthetic protein chemistry, including those involving crosslinking agents. For example, immunotoxins can be constructed using a disulfide exchange reaction or by forming a thioether bond. Examples of suitable reagents for this purpose include iminothiolate and methyl-4-mercaptobutyrimidate and those disclosed, for example, in U.S. Pat. No. 4,676,980.

[0371] 4.13.8 Effector Function Engineering

[0372] It can be desirable to modify the antibody of the invention with respect to effector finction, so as to enhance, e.g., the effectiveness of the antibody in treating cancer. For example, cysteine residue(s) can be introduced into the Fc region, thereby allowing interchain disulfide bond formation in this region. The homodimeric antibody thus generated can have improved internalization capability and/or increased complement-mediated cell killing and antibody-dependent cellular cytotoxicity (ADCC). See Caron et al., J. Exp Med., 176, 1191-1195 (1992) and Shopes, J. Immunol., 148, 2918-2922 (1992). Homodimeric antibodies with enhanced anti-tumor activity can also be prepared using heterobifunctional cross-linkers as described in Wolff et al. Cancer Research, 53, 2560-2565 (1993). Alternatively, an antibody can be engineered that has dual Fc regions and can thereby have enhanced complement lysis and ADCC capabilities. See Stevenson et al., Anti-Cancer Drug Design, 3, 219-230 (1989).

[0373] 4.13.9 Immunoconjugates

[0374] The invention also pertains to immunoconjugates comprising an antibody conjugated to a cytotoxic agent such as a chemotherapeutic agent, toxin (e.g., an enzymatically active toxin of bacterial, fungal, plant, or animal origin, or fragments thereof), or a radioactive isotope (i.e., a radioconjugate).

[0375] Chemotherapeutic agents useful in the generation of such imnlunoconjugates have been described above. Enzymatically active toxins and fragments thereof that can be used include diphtheria A chain, nonbinding active fragments of diphtheria toxin, exotoxin A chain (from Pseudomonas aeruginosa), ricin A chain, abrin A chain, modeccin A chain, alpha-sarcin, Aleurites fordii proteins, dianthin proteins, Phytolaca americana proteins (PAPI, PAPII, and PAP-S), momordica charantia inhibitor, curcin, crotin, sapaonaria officinalis inhibitor, gelonin, mitogellin, restrictocin, phenomycin, enomycin, and the tricothecenes. A variety of radionuclides are available for the production of radioconjugated antibodies. Examples include ²¹²Bi, 131I, ¹³¹In, ⁹⁰Y, and ¹⁸⁶Re.

[0376] Conjugates of the antibody and cytotoxic agent are made using a variety of bifunctional protein-coupling agents such as N-succinimidyl-3-(2-pyridyldithiol) propionate (SPDP), iminothiolane (IT), bifunctional derivatives of imidoesters (such as dimethyl adipimidate HCL), active esters (such as disuccinimidyl suberate), aldehydes (such as glutareldehyde), bis-azido compounds (such as bis (p-azidobenzoyl) hexanediamine), bis-diazonium derivatives (such as bis-p-diazoniumbenzoyl)-ethylenediamine), diisocyanates (such as tolyene 2,6-diisocyanate), and bis-active fluorine compounds (such as 1,5-difluoro-2,4-dinitrobenzene). For example, a ricin immunotoxin can be prepared as described in Vitetta et al., Science, 238: 1098 (1987). Carbon-14-labeled 1-isothiocyanatobenzyl-3-methyldiethylene triaminepentaacetic acid (MX-DTPA) is an exemplary chelating agent for conjugation of radionucleotide to the antibody. See WO94/11026.

[0377] In another embodiment, the antibody can be conjugated to a “receptor” (such streptavidin) for utilization in tumor pretargeting wherein the antibody-receptor conjugate is administered to the patient, followed by removal of unbound conjugate from the circulation using a clearing agent and then administration of a “ligand” (e.g., avidin) that is in turn conjugated to a cytotoxic agent.

[0378] 4.14 Computer Readable Sequences

[0379] In one application of this embodiment, a nucleotide sequence of the present invention can be recorded on computer readable media. As used herein, “computer readable media” refers to any medium which can be read and accessed directly by a computer. Such media include, but are not limited to: magnetic storage media, such as floppy discs, hard disc storage medium, and magnetic tape; optical storage media such as CD-ROM; electrical storage media such as RAM and ROM; and hybrids of these categories such as magnetic/optical storage media. A skilled artisan can readily appreciate how any of the presently known computer readable mediums can be used to create a manufacture comprising computer readable medium having recorded thereon a nucleotide sequence of the present invention. As used herein, “recorded” refers to a process for storing information on computer readable medium. A skilled artisan can readily adopt any of the presently known methods for recording information on computer readable medium to generate manufactures comprising the nucleotide sequence information of the present invention.

[0380] A variety of data storage structures are available to a skilled artisan for creating a computer readable medium having recorded thereon a nucleotide sequence of the present invention. The choice of the data storage structure will generally be based on the means chosen to access the stored information. In addition, a variety of data processor programs and formats can be used to store the nucleotide sequence information of the present invention on computer readable medium. The sequence information can be represented in a word processing text file, formatted in commercially-available software such as WordPerfect and Microsoft Word, or represented in the form of an ASCII file, stored in a database application, such as DB2, Sybase, Oracle, or the like. A skilled artisan can readily adapt any number of data processor structuring fonnats (e.g. text file or database) in order to obtain computer readable medium having recorded thereon the nucleotide sequence information of the present invention.

[0381] By providing any of the nucleotide sequences SEQ ID NO: 1-124, or 249-330 or a representative fragment thereof; or a nucleotide sequence at least 95% identical to any of the nucleotide sequences of SEQ ID NO: 1-124, or 249-330 in computer readable form, a skilled artisan can routinely access the sequence information for a variety of purposes. Computer software is publicly available which allows a skilled artisan to access sequence information provided in a computer readable medium. The examples which follow demonstrate how software which implements the BLAST (Altschul et al., J. Mol. Biol. 215:403-410 (1990)) and BLAZE (Brutlag et al., Comp. Chem. 17:203-207 (1993)) search algorithms on a Sybase system is used to identify open reading frames (ORFs) within a nucleic acid sequence. Such ORFs may be protein-encoding fragments and may be useful in producing commercially important proteins such as enzymes used in fermentation reactions and in the production of commercially useful metabolites.

[0382] As used herein, “a computer-based system” refers to the hardware means, software means, and data storage means used to analyze the nucleotide sequence information of the present invention. The minimum hardware means of the computer-based systems of the present invention comprises a central processing unit (CPU), input means, output means, and data storage means. A skilled artisan can readily appreciate that any one of the currently available computer-based systems are suitable for use in the present invention. As stated above, the computer-based systems of the present invention comprise a data storage means having stored therein a nucleotide sequence of the present invention and the necessary hardware means and software means for supporting and implementing a search means. As used herein, “data storage means” refers to memory which can store nucleotide sequence information of the present invention, or a memory access means which can access manufactures having recorded thereon the nucleotide sequence information of the present invention.

[0383] As used herein, “search means” refers to one or more programs which are implemented on the computer-based system to compare a target sequence or target structural motif with the sequence information stored within the data storage means. Search means are used to identify fragments or regions of a known sequence which match a particular target sequence or target motif. A variety of known algorithms are disclosed publicly and a variety of commercially available software for conducting search means are and can be used in the computer-based systems of the present invention. Examples of such software includes, but is not limited to, Smith-Waterman, MacPattern (EMBL), BLASTN and BLASTA (NPOLYPEPTIDEIA). A skilled artisan can readily recognize that any one of the available algorithms or implementing software packages for conducting homology searches can be adapted for use in the present computer-based systems. As used herein, a “target sequence” can be any nucleic acid or amino acid sequence of six or more nucleotides or two or more amino acids. A skilled artisan can readily recognize that the longer a target sequence is, the less likely a target sequence will be present as a random occurrence in the database. The most preferred sequence length of a target sequence is from about 10 to 300 amino acids, more preferably from about 30 to 100 nucleotide residues. However, it is well recognized that searches for commnercially important fragments, such as sequence fragments involved in gene expression and protein processing, may be of shorter length.

[0384] As used herein, “a target structural motif,” or “target motif,” refers to any rationally selected sequence or combination of sequences in which the sequences) are chosen based on a three-dimensional configuration which is formed upon the folding of the target motif. There are a variety of target motifs known in the art. Protein target motifs include, but are not limited to, enzyme active sites and signal sequences. Nucleic acid target motifs include, but are not limited to, promoter sequences, hairpin structures and inducible expression elements (protein binding sequences).

[0385] 4.15 Triple Helix Formation

[0386] In addition, the fragments of the present invention, as broadly described, can be used to control gene expression through triple helix formation or antisense DNA or RNA, both of which methods are based on the binding of a polyn-ucleotide sequence to DNA or RNA. Polynucleotides suitable for use in these methods are preferably 20 to 40 bases in length and are designed to be complementary to a region of the gene involved in transcription (triple helix-see Lee et al., Nucl. Acids Res. 6, 3073 (1979); Cooney et al., Science 15241, 456 (1988); and Dervan et al., Science 251, 1360 (1991)) or to the mRNA itself (anitisense-Olnmo, J. Neurochem. 56:560 (1991); Oligodeoxynucleotides as Antisenise Inhibitors of Gene Expression, CRC Press, Boca Raton, Fla. (1988)). Triple helix-formnation optimally results in a shut-off of RNA transcription from DNA, while antis ense RNA hybridization blocks translation of an mRNA molecule into polypeptide. Both techniques have been demonstrated to be effective in model systems. Information contained in the sequences of the present invention is necessary for the design of an antisense or triple helix oligonucleotide.

[0387] 4.16 Diagnostic Assays and Kits

[0388] The present invention further provides methods to identify the presence or expression of one of the ORFs of the present invention, or homolog thereof, in a test sample, using a nucleic acid probe or antibodies of the present invention, optionally conjugated or otherwise associated with a suitable label.

[0389] In general, methods for detecting a polynucleotide of the invention can comprise contacting a sample with a compound that binds to and forms a complex with the polynucleotide for a period sufficient to form the complex, and detecting the complex, so that if a complex is detected, a polynucleotide of the invention is detected in the sample. Such methods can also comprise contacting a sample under stringent hybridization conditions with nucleic acid primers that anneal to a polynucleotide of the invention under such conditions, and amplifying annealed polynucleotides, so that if a polynucleotide is amplified, a polynucleotide of the invention is detected in the sample.

[0390] In general, methods for detecting a polypeptide of the invention can comprise contacting a sample with a compound that binds to and forms a complex with the polypeptide for a period sufficient to form the complex, and detecting the complex, so that if a complex is detected, a polypeptide of the invention is detected in the sample.

[0391] In detail, such methods comprise incubating a test sample with one or more of the antibodies or one or more of the nucleic acid probes of the present invention and assaying for binding of the nucleic acid probes or antibodies to components within the test sample.

[0392] Conditions for incubating a nucleic acid probe or antibody with a test sample vary. Incubation conditions depend on the format employed in the assay, the detection methods employed, and the type and nature of the nucleic acid probe or antibody used in the assay. One skilled in the art will recognize that any one of the commonly available hybridization, amplification or immunological assay formats can readily be adapted to employ the nucleic acid probes or antibodies of the present invention. Examples of such assays can be found in Chard, T., An Introduction to Radioirnmunoassay and Related Techniques, Elsevier Science Publishers, Amsterdam, The Netherlands (1986); Bullock, G. R. et al., Techniques in Immunocytochemistry, Academic Press, Orlando, Fla. Vol. 1 (1982), Vol. 2 (1983), Vol. 3 (1985); Tijssen, P., Practice and Theory of immunoassays: Laboratory Techniques in Biochemistry and Molecular Biology, Elsevier Science Publishers, Amsterdam, The Netherlands (1985). The test samples of the present invention include cells, protein or membrane extracts of cells, or biological fluids such as sputum, blood, serum, plasma, or urine. The test sample used in the above-described method will vary based on the assay format, nature of the detection method and the tissues, cells or extracts used as the sample to be assayed. Methods for preparing protein extracts or membrane extracts of cells are well known in the art and can be readily be adapted in order to obtain a sample which is compatible with the system utilized.

[0393] In another embodiment of the present invention, kits are provided which contain the necessary reagents to carry out the assays of the present invention. Specifically, the invention provides a compartment kit to receive, in close confinement, one or more containers which comprises: (a) a first container comprising one of the probes or antibodies of the present invention; and (b) one or more other containers comprising one or more of the following: wash reagents, reagents capable of detecting presence of a bound probe or antibody.

[0394] In detail, a compartment kit includes any kit in which reagents are contained in separate containers. Such containers include small glass containers, plastic containers or strips of plastic or paper. Such containers allows one to efficiently transfer reagents from one compartment to another compartment such that the samples and reagents are not cross-contaminated, and the agents or solutions of each container can be added in a quantitative fashion from one compartment to another. Such containers will include a container which will accept the test sample, a container which contains the antibodies used in the assay, containers which contain wash reagents (such as phosphate buffered saline, Tris-buffers, etc.), and containers which contain the reagents used to detect the bound antibody or probe. Types of detection reagents include labeled nucleic acid probes, labeled secondary antibodies, or in the alternative, if the primary antibody is labeled, the enzymatic, or antibody binding reagents which are capable of reacting with the labeled antibody. One skilled in the art will readily recognize that the disclosed probes and antibodies of the present invention can be readily incorporated into one of the established kit formats which are well known in the art.

[0395] 4.17 Medical Imaging

[0396] The novel polypeptides and binding partners of the invention are useful in medical imaging of sites expressing the molecules of the invention (e.g., where the polypeptide of the invention is involved in the immune response, for imaging sites of inflammation or infection). See, e.g., Kunkel et al., U.S. Pat. No. 5,413,778. Such methods involve chemical attachment of a labeling or imaging agent, administration of the labeled polypeptide to a subject in a pharmaceutically acceptable carrier, and imaging the labeled polypeptide in vivo at the target site.

[0397] 4.18 Screening Assays

[0398] Using the isolated proteins and polynucleotides of the invention, the present invention further provides methods of obtaining and identifying agents which bind to a polypeptide encoded by an ORF corresponding to any of the nucleotide sequences set forth in SEQ ID NO: 1-124, or 249-330, or bind to a specific domain of the polypeptide encoded by the nucleic acid. In detail, said method comprises the steps of:

[0399] (a) contacting an agent with an isolated protein encoded by an ORF of the present invention, or nucleic acid of the invention; and

[0400] (b) determining whether the agent binds to said protein or said nucleic acid.

[0401] In general, therefore, such methods for identifying compounds that bind to a polynucleotide of the invention can comprise contacting a compound with a polynucleotide of the invention for a time sufficient to form a polynucleotide/compound complex, and detecting the complex, so that if a polynucleotide/compound complex is detected, a compound that binds to a polynucleotide of the invention is identified.

[0402] Likewise, in general, therefore, such methods for identifying compounds that bind to a polypeptide of the invention can comprise contacting a compound with a polypeptide of the invention for a time sufficient to form a polypeptide/compound complex, and detecting the complex, so that if a polypeptide/compound complex is detected, a compound that binds to a polynucleotide of the invention is identified.

[0403] Methods for identifying compounds that bind to a polypeptide of the invention can also comprise contacting a compound with a polyp/eptide of the invention in a cell for a time sufficient to form a polypeptide/compound complex, wherein the complex drives expression of a receptor gene sequence in the cell, and detecting the complex by detecting reporter gene sequence expression, so that if a polypeptide/compound complex is detected, a compound that binds a polypeptide of the invention is identified.

[0404] Compounds identified via such methods can include compounds which modulate the activity of a polypeptide of the invention (that is, increase or decrease its activity, relative to activity observed in the absence of the compound). Alternatively, compounds identified via such methods can include compounds which modulate the expression of a polynucleotide of the invention (that is, increase or decrease expression relative to expression levels observed in the absence of the compound). Compounds, such as compounds identified via the methods of the invention, can be tested using standard assays well known to those of skill in the art for their ability to modulate activity/expression.

[0405] The agents screened in the above assay can be, but are not limited to, peptides, carbohydrates, vitamin derivatives, or other pharmaceutical agents. The agents can be selected and screened at random or rationally selected or designed using protein modeling techniques.

[0406] For random screening, agents such as peptides, carbohydrates, pharmaceutical agents and the like are selected at random and are assayed for their ability to bind to the protein encoded by the ORF of the present invention. Alternatively, agents may be rationally selected or designed. As used herein, an agent is said to be “rationally selected or designed” when the agent is chosen based on the configuration of the particular protein. For example, one skilled in the art can readily adapt currently available procedures to generate peptides, pharmaceutical agents and the like, capable of binding to a specific peptide sequence, in order to generate rationally designed antipeptide peptides, for example see Hurby et al., Application of Synthetic Peptides: Antisense Peptides,” In Synthetic Peptides, A User's Guide, W. H. Freeman, New York (1992), pp. 289-307, and Kaspczak et al., Biochemistry 28:9230-8 (1989), or pharmaceutical agents, or the like.

[0407] In addition to the foregoing, one class of agents of the present invention, as broadly described, can be used to control gene expression through binding to one of the ORFs or EMFs of the present invention. As described above, such agents can be randomly screened or rationally designed/selected. Targeting the ORF or EMF allows a skilled artisan to design sequence specific or element specific agents, modulating the expression of either a single ORF or multiple ORFs which rely on the same EMF for expression control. One class of DNA binding agents are agents which contain base residues which hybridize or form a triple helix formation by binding to DNA or RNA. Such agents can be based on the classic phosphodiester, ribonucleic acid backbone, or can be a variety of sulfhydryl or polymeric derivatives which have base attachment capacity.

[0408] Agents suitable for use in these methods preferably contain 20 to 40 bases and are designed to be complementary to a region of the gene involved in transcription (triple helix—see Lee et al., Nucl. Acids Res. 6, 3073 (1979); Cooney et al., Science 241, 456 (1988); and Dervan et al., Science 251, 1360 (1991)) or to the mRNA itself (antisense-Okano, J. Neurochem. 56, 560 (1991); Oligodeoxynucleotides as Antisense Inhibitors of Gene Expression, CRC Press, Boca Raton, Fla. (1988)). Triple helix-formation optimally results in a shut-off of RNA transcription from DNA, while antisense RNA hybridization blocks translation of an mRNA molecule into polypeptide. Both techniques have been demonstrated to be effective in model systems. Information contained in the sequences of the present invention is necessary for the design of an antisense or triple helix oligonucleotide and other DNA binding agents.

[0409] Agents which bind to a protein encoded by one of the ORFs of the present invention can be used as a diagnostic agent. Agents which bind to a protein encoded by one of the ORFs of the present invention can be formulated using known techniques to generate a pharmaceutical composition.

[0410] 4.19 Use of Nucleic Acids as Probes

[0411] Another aspect of the subject invention is to provide for polypeptide-specific nucleic acid hybridization probes capable of hybridizing with naturally occurring nucleotide sequences. The hybridization probes of the subject invention may be derived from any of the nucleotide sequences SEQ ID NO: 1-124, or 249-330. Because the corresponding gene is only expressed in a limited number of tissues, a hybridization probe derived from any of the nucleotide sequences SEQ ID NO: 1-124, or 249-330 can be used as an indicator of the presence of RNA of cell type of such a tissue in a sample.

[0412] Any suitable hybridization technique can be employed, such as, for example, in situ hybridization. PCR as described in U.S. Pat. Nos. 4,683,195 and 4,965,188 provides additional uses for oligonucleotides based upon the nucleotide sequences. Such probes used in PCR may be of recombinant origin, may be chemically synthesized, or a mixture of both. The probe will comprise a discrete nucleotide sequence for the detection of identical sequences or a degenerate pool of possible sequences for identification of closely related genomic sequences.

[0413] Other means for producing specific hybridization probes for nucleic acids include the cloning of nucleic acid sequences into vectors for the production of mRNA probes. Such vectors are known in the art and are commercially available and may be used to synthesize RNA probes in vitro by means of the addition of the appropriate RNA polymerase as T7 or SP6 RNA polymerase and the appropriate radioactively labeled nucleotides. The nucleotide sequences may be used to construct hybridization probes for mapping their respective genomic sequences. The nucleotide sequence provided herein may be mapped to a chromosome or specific regions of a chromosome using well-known genetic and/or chromosomal mapping techniques. These techniques include in situ hybridization, linkage analysis against known chromosomal markers, hybridization screening with libraries or flow-sorted chromosomal preparations specific to known chromosomes, and the like. The technique of fluorescent in situ hybridization of chromosome spreads has been described, among other places, in Verma et al (1988) Human Chromosomes: A Manual of Basic Techniques, Pergamon Press, New York N.Y.

[0414] Fluorescent in situ hybridization of chromosomal preparations and other physical chromosome mapping techniques may be correlated with additional genetic map data. Examples of genetic map data can be found in the 1994 Genome Issue of Science (265:198 1f). Correlation between the location of a nucleic acid on a physical chromosomal map and a specific disease (or predisposition to a specific disease) may help delimit the region of DNA associated with that genetic disease. The nucleotide sequences of the subject invention may be used to detect differences in gene sequences between normal, carrier or affected individuals.

[0415] 4.20 Preparation of Support Bound Oligonucleotides

[0416] Oligonucleotides, i.e., small nucleic acid segments, may be readily prepared by, for example, directly synthesizing the oligonucleotide by chemical means, as is commonly practiced using an automated oligonucleotide synthesizer.

[0417] Support bound oligonucleotides may be prepared by any of the methods known to those of skill in the art using any suitable support such as glass, polystyrene or Teflon. One strategy is to precisely spot oligonucleotides synthesized by standard synthesizers. Immobilization can be achieved using passive adsorption (Inouye & Hondo, (1990) J. Clin. Microbiol. 28(6), 1469-72); using UV light (Nagata et al., 1985; Dahlen et al., 1987; Morrissey & Collins, (1989) Mol. Cell Probes 3(2) 189-207) or by covalent binding of base modified DNA (Keller et al., 1988; 1989); all references being specifically incorporated herein.

[0418] Another strategy that may be employed is the use of the strong biotin-streptavidin interaction as a linlker. For example, Broude et al. (1994) Proc. Natl. Acad. Sci. USA 91(8), 3072-6, describe the use of biotinylated probes, although these are duplex probes, that are immobilized on streptavidin-coated magnetic beads. Streptavidin-coated beads may be purchased from Dynal, Oslo. Of course, this same linking chemistry is applicable to coating any surface with streptavidin. Biotinylated probes may be purchased from various sources, such as, e.g., Operon Technologies (Alameda, Calif.).

[0419] Nunc Laboratories (Naperville, Ill.) is also selling suitable material that could be used. Nunc Laboratories have developed a method by which DNA can be covalently bound to the microwell surface tenned Covalink NH. CovaLiik NH is a polystyrene surface grafted with secondary amino groups (>NH) that serve as bridgeheads for fiter covalent coupling. CovaLiik Modules may be purchased from Nunc Laboratories. DNA molecules may be bound to CovaLink exclusively at the 5′-end by a phosphoramidate bond, allowing immobilization of more than 1 pmol of DNA (Rasmussen et al., (1991) Anal. Biochem. 198(1) 138-42).

[0420] The use of CovaLink NH strips for covalent binding of DNA molecules at the 5′-end has been described (Rasmussen et al., (1991). In this technology, a phosphoramidate bond is employed (Chu et al., (1983) Nucleic Acids Res. 11(8) 6513-29). This is beneficial as immobilization using only a single covalent bond is preferred. The phosphoramidate bond joins the DNA to the CovaLink NH secondary ainino groups that are positioned at the end of spacer arms covalently grafted onto the polystyrene surface through a 2 nm long spacer armn. To link an oligonucleotide to CovaLink NH via an phosphoramidate bond, the oligonucleotide terminus must have a 5′-end phosphate group. It is, perhaps, even possible for biotin to be covalently bound to CovaLink and then streptavidin used to bind the probes.

[0421] More specifically, the linkage method includes dissolving DNA in water (7.5 ng/μl) and denaturing for 10 min. at 95° C. and cooling on ice for 10 min. Ice-cold 0.1 M 1-methylimidazole, pH 7.0 (1 -MeIm₇), is then added to a final concentration of 10 mM 1-MeIm₇. A ssDNA solution is then dispensed into CovaLink NH strips (75 μ/l well) standing on ice.

[0422] Carbodiimide 0.2 M 1-ethyl-3-(3-dimethylaminopropyl)-carbodiimide (EDC), dissolved in 10 mM I-MeIn₇, is made fresh and 25 μl added per well. The strips are incubated for 5 hours at 50° C. After incubation the strips are washed using, e.g., Nunc-Immuno Wash; first the wells are washed 3 times, then they are soaked with washing solution for 5 min., and finally they are washed 3 times (where in the washing solution is 0.4 N NaOH, 0.25% SDS heated to 50° C.).

[0423] It is contemplated that a further suitable method for use with the present invention is that described in PCT Patent Application WO 90/03382 (Southern & Maskos), incorporated herein by reference. This method of preparing an oligonucleotide bound to a support involves attaching a nucleoside 3′-reagent through the phosphate group by a covalent phosphodiester link to aliphatic hydroxyl groups carried by the support. The oligonucleotide is then synthesized on the supported nucleoside and protecting groups removed from the synthetic oligonucleotide chain under standard conditions that do not cleave the oligonucleotide from the support. Suitable reagents include nucleoside phosphoramidite and nucleoside hydrogen phosphorate.

[0424] An on-chip strategy for the preparation of DNA probe for the preparation of DNA probe arrays may be employed. For example, addressable laser-activated photodeprotection may be employed in the chemical synthesis of oligonucleotides directly on a glass surface, as described by Fodor et al. (1991) Science 251(4995), 767-73, incorporated herein by reference. Probes may also be immobilized on nylon supports as described by Van Ness et al. (1991) Nucleic Acids Res., 19(12) 3345-50; or linked to Teflon using the method of Duncan & Cavalier (1988) Anal. Biochem. 169(1), 104-8; all references being specifically incorporated herein.

[0425] To link an oligonucleotide to a nylon support, as described by Van Ness et al. (1991), requires activation of the nylon surface via alkylation and selective activation of the 5′-amine of oligonucleotides with cyanuric chloride.

[0426] One particular way to prepare support bound oligonucleotides is to utilize the light-generated synthesis described by Pease et al, (1994) Proc. Nat'l. Acad. Sci., USA 91(11), 5022-6, incorporated herein by reference). These authors used current photolithographic techniques to generate arrays of imrmobilized oligonucleotide probes (DNA chips). These methods, in which light is used to direct the synthesis of oligonucleotide probes in high-density, miniaturized arrays, utilize photolabile 5′-protected N-acyl-deoxynucleoside phosphoramidites, surface linker chemistry and versatile combinatorial synthesis strategies. A matrix of 256 spatially defined oligonucleotide probes may be generated in this manner.

[0427] 4.21 Preparation of Nucleic Acid Fragments

[0428] The nucleic acids may be obtained from any appropriate source, such as cDNAs, genomic DNA, chromosomal DNA, microdissected chromosome bands, cosmid or YAC inserts, and RNA, including mRNA without any amplification steps. For example, Sambrook et al. (1989) describes three protocols for the isolation of high molecular weight DNA from mammalian cells (p. 9.14-9.23).

[0429] DNA fragments maybe prepared as clones in M13, plasmid or lambda vectors and/or prepared directly firom genomic DNA or cDNA by PCR or other amplification methods. Samples may be prepared or dispensed in multiwell plates. About 100-1000 ng of DNA samples may be prepared in 2-500 ml of final volume.

[0430] The nucleic acids would then be fragmented by any of the methods known to those of skill in the art including, for example, using restriction enzymes as described at 9.24-9.28 of Sambrook et al. (1989), shearing by ultrasound and NaOH treatment.

[0431] Low pressure shearing is also appropriate, as described by Schriefer et al. (1990) Nucleic Acids Res. 18(24), 7455-6, incorporated herein by reference). In this method, DNA samples are passed through a small French pressure cell at a variety of low to intermediate pressures. A lever device allows controlled application of low to intermediate pressures to the cell. The results of these studies indicate that low-pressure shearing is a useful alternative to sonic and enzymatic DNA fragmentation methods.

[0432] One particularly suitable way for fragmenting DNA is contemplated to be that using the two base recognition endonuclease, CviJI, described by Fitzgerald et al. (1992) Nucleic Acids Res. 20(14) 3753-62. These authors described an approach for the rapid fragmentation and fractionation of DNA into particular sizes that they contemplated to be suitable for shotgun cloning and sequencing.

[0433] The restriction endonuclease CviJI normally cleaves the recognition sequence PuGCPy between the G and C to leave blunt ends. Atypical reaction conditions, which alter the specificity of this enzyme (CviJI**), yield a quasi-random distribution of DNA fragments form the small molecule pUC19 (2688 base pairs). Fitzgerald et al. (1992) quantitatively evaluated the randomness of this fragmentation strategy, using a CviJI** digest of pUC19 that was size fractionated by a rapid gel filtration method and directly ligated, without end repair, to a lac Z minus M13 cloning vector. Sequence analysis of 76 clones showed that CviJI** restricts pyGCPy and PuGCPu, in addition to PuGCPy sites, and that new sequence data is accumulated at a rate consistent with random fragmentation.

[0434] As reported in the literature, advantages of this approach compared to sonication and agarose gel fractionation include: smaller amounts of DNA are required (0.2-0.5 μg instead of 2-5 μg); and fewer steps are involved (no preligation, end repair, chemical extraction, or agarose gel electrophoresis and elution are needed).

[0435] Irrespective of the manner in which the nucleic acid fragments are obtained or prepared, it is important to denature the DNA to give single stranded pieces available for hybridization. This is achieved by incubating the DNA solution for 2-5 minutes at 80-90° C. The solution is then cooled quickly to 2° C. to prevent renaturation of the DNA fragments before they are contacted with the chip. Phosphate groups must also be removed from genoinic DNA by methods known in the art.

[0436] 4.22 Preparation of DNA Arrays

[0437] Arrays may be prepared by spotting DNA samples on a support such as a nylon membrane. Spotting may be performed by using arrays of metal pins (the positions of which correspond to an array of wells in a microtiter plate) to repeated by transfer of about 20 nl of a DNA solution to a nylon membrane. By offset printing, a density of dots higher than the density of the wells is achieved. One to 25 dots may be accommodated in 1 mm², depending on the type of label used. By avoiding spotting in some preselected number of rows and columns, separate subsets (subarrays) may be formed. Samples in one subarray may be the same genomic segment of DNA (or the same gene) from different individuals, or may be different, overlapped genomic clones. Each of the subarrays may represent replica spotting of the same samples. In one example, a selected gene segment may be amplified from 64 patients. For each patient, the amplified gene segment may be in one 96-well plate (all 96 wells containing the same sample). A plate for each of the 64 patients is prepared. By using a 96-pin device, all samples may be spotted on one 8×12 cm membrane. Subarrays may contain 64 samples, one from each patient. Where the 96 subarrays are identical, the dot span may be 1 mm2 and there may be a 1 mm space between subarrays.

[0438] Another approach is to use membranes or plates (available from NUNC, Naperville, Ill.) which may be partitioned by physical spacers e.g. a plastic grid molded over the membrane, the grid being similar to the sort of membrane applied to the bottom of multiwell plates, or hydrophobic strips. A fixed physical spacer is not preferred for imaging by exposure to flat phosphor-storage screens or x-ray films.

[0439] The present invention is illustrated in the following examples. Upon consideration of the present disclosure, one of skill in the art will appreciate that many other embodiments and variations may be made in the scope of the present invention. Accordingly, it is intended that the broader aspects of the present invention not be limited to the disclosure of the following examples. The present invention is not to be limited in scope by the exemplified embodiments which are intended as illustrations of single aspects of the invention, and compositions and methods which are functionally equivalent are within the scope of the invention. Indeed, numerous modifications and variations in the practice of the invention are expected to occur to those skilled in the art upon consideration of the present preferred embodiments. Consequently, the only limitations which should be placed upon the scope of the invention are those which appear in the appended claims.

[0440] All references cited within the body of the instant specification are hereby incorporated by reference in their entirety.

### 5.0 EXAMPLES

[0441] 5.1 Example 1

[0442] Novel Nucleic Acid Sequences Obtained from Various Libraries

[0443] A plurality of novel nucleic acids were obtained from cDNA libraries prepared from various human tissues and in some cases isolated from a genomic library derived from human chromosome using standard PCR, SBH sequence signature analysis and Sanger sequencing techniques. The inserts of the library were amplified with PCR using primers specific for the vector sequences which flank the inserts. Clones from cDNA libraries were spotted on nylon membrane filters and screened with oligonucleotide probes (e.g., 7-mers) to obtain signature sequences. The clones were clustered into groups of similar or identical sequences. Representative clones were selected for sequencing.

[0444] In some cases, the 5′ sequence of the amplified inserts was then deduced using a typical Sanger sequencing protocol. PCR products were purified and subjected to fluorescent dye terminator cycle sequencing. Single pass gel sequencing was done using a 377 Applied Biosystems (ABI) sequencer to obtain the novel nucleic acid sequences.

[0445] 5.2 Example 2

[0446] Assemblage of Novel Nucleic Acids

[0447] The contigs or nucleic acids of the present invention, designated as SEQ ID NO: 249-330 were assembled using an EST sequence as a seed. Then a recursive algorithm was used to extend the seed EST into an extended assemblage, by pulling additional sequences from different databases (i.e., Hyseq's database containing EST sequences, dbEST, gb pri, and UniGene, and exons from public domain genomnic sequences predicated by GenScan) that belong to this assemblage. The algorithm terminated when there were no additional sequences from the above databases that would extend the assemblage. Further, inclusion of component sequences into the assemblage was based on a BLASTN hit to the extending assemblage with BLAST score greater than 300 and percent identity greater than 95%.

[0448] Table 8 sets forth the novel predicted polypeptides (including proteins, SEQ ID NO: 331-412) encoded by the novel polynucleotides (SEQ ID NO: 249-330) of the present invention, and their corresponding translation start and stop nucleotide locations to each of SEQ ID NO: 249-330. Table 8 also indicates the method by which the polypeptide was predicted. Method A refers to a polypeptide obtained by using a software program called FASTY (available from http://fasta.bioch.virginia,edu) which selects a polypeptide based on a comparison of the translated novel polynucleotide to known polynucleotides (W. R. Pearson, Methods in Enzymology, 183:63-98 (1990), herein incorporated by reference). Method B refers to a polypeptide obtained by using a software program called GenScan for human/vertebrate sequences (available from Stanford University, Office of Technology Licensing) that predicts the polypeptide based on aprobabilistic model of gene structure/compositional properties (C. Burge and S. Karlin, J. Mol. Biol., 268:78-94 (1997), incorporated herein by reference). Method C refers to a polypeptide obtained by using a Hyseq proprietary software program that translates the novel polynucleotide and its complementary strand into six possible amino acid sequences (forward and reverse frames) and chooses the polypeptide with the longest open reading frame.

[0449] 5.3 Example 3

[0450] Novel Nucleic Acids

[0451] The novel nucleic acids of the present invention were assembled from sequences that were obtained from a cDNA library by methods described in Example 1 above, and in some cases sequences obtained from one or more public databases. The nucleic acids were assembled using an EST sequence as a seed. Then a recursive algorithm was used to extend the seed EST into an extended assemblage, by pulling additional sequences from different databases (Hyseq's database containing EST sequences, dbEST, gb pri, and UniGene) that belong to this assemblage. The algorithm terminated when there was no additional sequences from the above databases that would extend the assemblage. Inclusion of component sequences into the assemblage was based on a BLASTN hit to the extending assemblage with BLAST score greater than 300 and percent identity greater than 95%.

[0452] Using PBRAP (Univ. of Washington) or CAP4 (Paracel), a full-length gene cDNA sequence and its corresponding protein sequence were generated from the assemblage. Any frame shifts and incorrect stop codons were corrected by hand editing. During editing, the sequences were checked using FASTY and/or BLAST against Genebank (i.e., dbEST, gb pri, UniGene, and Genpept) and the Geneseq (Derwent). Other computer programs which may have been used in the editing process were PhredPhrap and Consed (University of Washington) and ed-ready, ed-ext and cg-zip-2 (Hyseq, Inc.). The full-length nucleotide and amino acid sequences, including splice variants resulting from these procedures are shown in the Sequence Listing as SEQ ID NO: 1-124.

[0453] SEQ ID NO: 1-37 were determined to contain transmembrane regions using Neural Network SignalP V1.1 program (from Center for Biological Sequence Analysis, The Technical University of Deinark); and TMpred program (http://www.ch.embnet.org/software/TMPRED form.html).

[0454] SEQ ID NO: 38-124 were determined to be membrane-bound polypeptides using a proprietary algorithm, SeqLocm (Hyseq Inc.). SeqLoc™ classifies the proteins into three sets of locales: intracellular, membrane, or secreted. This prediction is calculated using maximum likelihood estimation of three characteristics of each polypeptide, 1) percentage of cysteine residues, 2) Kyte-Doolittle scores for the first 20 amino acids of each protein (J. Mol Biol, 157, pp. 105-31 (1982), incorporated herein by reference), and 3) Kyte-Doolittle scores to calculate the longest hydrophobic stretch (LHS) of the said protein (J. Mol Biol, 157, pp. 105-31 (1982), incorporated herein by reference). The LHS is calculated by finding the stretch of 20 amino acid residues in the protein that have the highest sum of Kyte-Doolittle hydrophobicity values.

[0455] Table 1 shows the various tissue sources of SEQ ID NO: 1-124.

[0456] The homologs for polypeptides SEQ ID NO: 125-248, that correspond to nucleotide sequences SEQ ID NO: 1-124 were obtained by a BLASTP version 2.0al 19MP-WashU searches against current Genpept release using BLAST algorithm. The results showing homologues for SEQ ID NO: 125-248 from Genpept 124 are shown in Table 2.

[0457] Using eMatrix software package (Stanford University, Stanford, Calif.) (Wu et al., J. Comp. Biol., Vol. 6, 219-235 (1999), http://motif.stanford.edu/ematrix-search/herein incorporated by reference), all the polypeptide sequences were examined to determine whether they had identifiable signature regions. Scoring matrices of the eMatrix software package are derived from the BLOCKS, PRINTS, PFAM, PRODOM, and DOMO databases. Table 3 shows the accession number of the homologous eMatrix signature found in the indicated polypeptide sequence, its description, and the results obtained which include accession number subtype; raw score; p-value; and the position of signature in amino acid sequence.

[0458] Using the Pfam software program (Sonnhammer et al., Nucleic Acids Res., Vol. 26(1) pp. 320-322 (1998) herein incorporated by reference) all the polypeptide sequences were examined for domains with homology to certain peptide domains. Table 4 shows the name of the Pfam model found, the description, the product of their e-value, the Pfam score for the identified model within the sequence, number of domains found in the polypeptide sequence, and position(s) of the Pfam domain. Further description of the Pfam models can be found at http://pfam.wustl.edu/.

[0459] The GeneAtlas™ software package (Molecular Simulations Inc. (MSI), San Diego, Calif.) was used to predict the three-dimensional structure models for the polypeptides encoded by SEQ ID NO 1-125 (i.e. SEQ ID NO: 125-248). Models were generated by (1) PSI-BLAST which is a multiple alignment sequence profile-based searching developed by Altschul et al, (Nucl. Acids. Res. 25, 3389-3408 (1997)), (2) High Throughput Modeling (HTM) (Molecular Simulations Inc. (MSI) San Diego, Calif.) which is an automated sequence and structure searching procedure (http://www.msi.com/), and (3) SeqFold™ which is a fold recognition method described by Fischer and Eisenberg (J. Mol. Biol. 209, 779-791 (1998)). This analysis was carried out, in part, by comparing the polypeptides of the invention with the known NMR (nuclear magnetic resonance) and x-ray crystal three-dimensional structures as templates. Table 5 shows: “PDB ID”, the Protein DataBase (PDB) identifier given to template structure; “Chain ID”, identifier of the subcomponent of the PDB template structure; “Compound Information”, information of the PDB template structure and/or its subcomponents; “PDB Function Annotation” gives function of the PDB template as annotated by the PDB files (http:/www.rcsb.orgPDB/); start and end amino acid position of the protein sequence aligned; PSI-BLAST score, the verify score, the SeqFold score, and the Potential(s) of Mean Force (PMF). The verify score is produced by GeneAtlas™ software (MSI), is based on Dr. Eisenberg's Profile-3D threading program developed in Dr. David Eisenberg's laboratory (U.S. Pat. No. 5,436,850 and Luthy, Bowie, and Eisenberg, Nature, 356:83-85 (1992)) and a publication by R. Sanchez and A. Sali, Proc. Natl. Acad. Sci. USA, 95:13597-12502. The verify score produced by GeneAtlas normalizes the verify score for proteins with different lengths so that a unified cutoff can be used to select good models as follows:

Verify score (normalized)=(raw score−½ high score)/(½ high score)

[0460] The PMF score, produced by GeneAtlas™ software (MSI), is a composite scoring function that depends in part on the compactness of the model, sequence identity in the alignment used to build the model, pairwise and surface mean force potentials (MFP). As given in table 5, a verify score between 0 to 1.0, with 1 being the best, represents a good model. Similarly, a PMF score between 0 to 1.0, with 1 being the best, represents a good model. A SeqFold™ score of more than 50 is considered significant. A good model may also be determined by one of skill in the art based all the information in Table 5 taken in totality.

[0461] Table 6 shows the position of the signal peptide for polypeptides of the present invention and the maximum score and the mean score associated with that signal peptide using Neural Network SignalP V1.1 program (from Center for Biological Sequence Analysis, The Technical University of Denmark). The process for identifying prokaryotic and eukaryotic signal peptides and their cleavage sites are also disclosed by Henrik Nielson, Jacob Engelbrecht, Soren Brunak, and Gunnar von Heijne in the publication “Identification of prokaryotic and eukaryotic signal peptides and prediction of their cleavage sites” Protein Engineering, Vol. 10, no. 1, pp. 1-6 (1997), incorporated herein by reference. A maximum S score and a mean S score, as described in the Nielson et al reference, was obtained for the polypeptide sequences.

[0462] Table 7 correlates each of SEQ ID NO: 1-124 to a specific chromosomal location.

[0463] Table 10 shows number of transmembrane regions, position of transmembrane 30 regions and score for each of the transmembrane region detected using Neural Network SignalP V1.1 program (from Center for Biological Sequence Analysis, The Technical University of Demnark);and TMPred program (http://www.ch.embnet.org/software/TMPRED form.html).

[0464] Table 9 is a correlation table of the novel polynucleotide sequences SEQ ID NO: 1-124, their corresponding polypeptide sequences SEQ ID NO: 125-248, their corresponding priority contig nucleotide sequences SEQ ID NO: 249-330, their corresponding priority contig polypeptide sequences SEQ ID NO: 331-412, and the US serial number of the priority application in which the contig sequence was filed.

TABLE 1

| | RNA | Library | |
|---|---|---|---|
| Tissue Origin | Source | Name | SEQ ID NO: |
| adult brain | GIBCO | AB3001 | 112 |
| adult brain | GIBCO | ABD003 | 3-4 10 16 33 60 67-68 71 77 110 114-116 121-122 |
| adult brain | Clontech | ABR001 | 3 102 |
| adult brain | Clontech | ABR006 | 7 9 30 55 59-60 70 75 83 90 96 102 107 114-116 |
| adult brain | Clontech | ABR008 | 2-3 5 7 9-12 21-22 25 30 34 37-39 43 45-47 58 60 62 71-72 78 83 |
| | | | 87 90 100 103 107 120-122 124 |
| adult brain | BioChain | ABR012 | 60 122 |
| adult brain | BioChain | ABR013 | 102 |
| adult brain | Invitrogen | ABR014 | 75 102 122 124 |
| adult brain | Invitrogen | ABR015 | 11 33 62 71 75 102 122 |
| adult brain | Invitrogen | ABR016 | 71 102 |
| adult brain | Invitrogen | ABT004 | 3 7 16 20 33 37 63 74 78 102 106 |
| cultured | Stratagene | ADP001 | 10 12 55 71 102 122 124 |
| preadipocytes | | | |
| adrenal gland | Clontech | ADR002 | 5 23 33 38-39 45 60 63 71 79 94 101 106 112 |
| adult heart | GIBCO | AHR001 | 1 3 10 14 33 47 59 62-66 71 73-74 78 81 87 91 102-103 114-116 |
| | | | 124 |
| adult kidney | GIBCO | AKD001 | 3 10-13 21 29-30 33-34 36 52 55-56 58 60 62 68 71 74 91 102-103 |
| | | | 110 114-116 122 124 |
| adult kidney | Invitrogen | AKT002 | 9 11 30 36 53 63 71 84 102 104 114-115 124 |
| adult lung | GIBCO | ALG001 | 3 5 30 33 71 74 |
| lymph node | Clontech | ALN001 | 12 58 71 74 85 122 |
| young liver | GIBCO | ALV001 | 3 10 30 33 55 68 70-71 103 |
| adult liver | Invitrogen | ALV002 | 3-4 11-12 14-15 25 33 56 58 63 69 71-72 79 102-103 122 124 |
| adult liver | Clontech | ALV003 | 36 71 103 |
| adult ovary | Invitrogen | AOV001 | 3 5 10 20 33-36 45 52-53 55 57-58 60 63 67-69 71 74 79 87 89 91 |
| | | | 102 106 112-113 116 122 124 |
| adult placenta | Clontech | APL001 | 71 |
| placenta | Invitrogen | APL002 | 17 63 106 124 |
| adult spleen | GIBCO | ASP001 | 4 10-12 36 42 62-63 71 102 116 122 124 |
| adult testis | GIBCO | ATS001 | 3 30 33 36 45 67-69 71 74 89 124 |
| adult bladder | Invitrogen | BLD001 | 3 71 96 |
| bone marrow | Clontech | BMD001 | 3 5 10 12 19 33 55 60 63-66 71 74 83 87 91-93 112 123 |
| bone marrow | Clontech | BMD002 | 5 10 12 14 23 30-31 33 38-39 42-43 58-60 63-66 69 71-72 74 78 |
| | | | 92-93 96 102 107 109 116 124 |
| adult colon | Invitrogen | CLN001 | 3 5 7 24 44 106 116 |
| mixture of 16 | various | CTL016 | 12 |
| tissues/mRNAs | vendors | | |
| adult cervix | BioChain | CVX001 | 5 10 13 17 30 36 38-39 54-56 59-60 63 68 71 74 91 93 102 116 122 |
| endothelial | Stratagene | EDT001 | 3 10-11 20 29 33 43 53 55 58-59 62 67 71 80 90-91 102 116 122 |
| cells | | | 124 |
| fetal brain | Clontech | FBR001 | 58 75 |
| fetal brain | Clontech | FBR004 | 90 100 105 |
| fetal brain | Clontech | FBR006 | 3 5 7 10-12 25 30 37 45 58 60 62-63 69 103 107 112 118 121 |
| fetal brain | Invitrogen | FBT002 | 5 10-11 30 33 38-39 45 90 102 |
| fetal heart | Invitrogen | FHR001 | 11-12 14 18 34 59-60 69 71 103 105 112 117 |
| fetal kidney | Clontech | FKD001 | 62-63 71 |
| fetal kidney | Clontech | FKD002 | 3 5 12 30 38-39 55 59 62 71 103 |
| fetal kidney | Invitrogen | FKD007 | 38-39 |
| fetal lung | Clontech | FLG001 | 36 52 71 113 |
| fetal lung | Invitrogen | FLG003 | 3 11 18 27 30 62-63 69 71 96 112 |
| fetal liver- | Columbia | FLS001 | 3-5 10 12 25 29 33-34 38-39 43 52-53 55-63 67 70-71 74 87 91 |
| spleen | University | | 102-104 106 110 113 116 119 121-122 124 |
| fetal liver- | Columbia | FLS002 | 4 10-11 20 25 33 44-45 50-51 55-57 61-63 70 87 91 100 103 106-107 |
| spleen | University | | 109 113 116 121-122 |
| fetal liver- | Columbia | FLS003 | 43 55 63 71 87 96 103 107 124 |
| spleen | University | | |
| fetal liver | Invitrogen | FLV001 | 3 20 25 30 33 47 56 58 71 124 |
| fetal liver | Clontech | FLV002 | 58 70-71 83 |
| fetal liver | Clontech | FLV004 | 3 5 11 33 35-36 45 52 55-56 71-72 79 100 102-103 105 122 |
| fetal muscle | Invitrogen | FMS001 | 3 14 47 60 71 102 122 |
| fetal muscle | Invitrogen | FMS002 | 4-5 14 55 71-72 80 |
| fetal skin | Invitrogen | FSK001 | 3 10-11 14 17 27-28 30 36 44 54 57-58 61 63 69 71 105 112 124 |
| fetal skin | Invitrogen | FSK002 | 3-4 11 18 38-39 43-45 53 69 71 79 105 107 120 |
| umbilical cord | BioChain | FUC001 | 3 18 34-35 48-49 55 60 62 67 71 74 91 102 104 106 112-113 116 |
| | | | 122 |
| fetal brain | GIBCO | HFB001 | 3-6 10 33 55 60 62 67-68 71 74-75 87 102 114-115 122 124 |
| macrophage | Invitrogen | HMP001 | 3 53 63 72-73 |
| infant brain | Columbia | IB2002 | 3-4 7 10 16 25 30 45 55 58 63 84 90 102 106 110 113 |
| | University | | |
| infant brain | Columbia | IB2003 | 3 6-7 10-11 30 55 74 87 90 106 110 |
| | University | | |
| infant brain | Columbia | IBM002 | 124 |
| | University | | |
| infant brain | Columbia | IBS001 | 7 30 100 120 |
| | University | | |
| lung, fibroblast | Stratagene | LFB001 | 3 10-11 53 67 71 111 |
| lung tumor | Invitrogen | LGT002 | 10 12 15 30 33 52 62 70-71 74 87-88 91 94 98 102 110 113-115 |
| | | | 122 |
| lymphocytes | ATCC | LPC001 | 3 15 24 31 47 52 55 58 63-66 68 72 102 108-109 112-113 |
| leukocyte | GIBCO | LUC001 | 3-5 10-13 15 24 30-31 36 41 52 55 60 62-66 68-69 71-72 74 87 92-93 |
| | | | 101-102 112 116 122 |
| leukocyte | Clontech | LUC003 | 20 62-63 71 116 |
| melanoma | Clontech | MEL004 | 5 36 71 99 113 122 |
| from-cell-line- | | | |
| ATCC-#CRL- | | | |
| 1424 | | | |
| mammary | Invitrogen | MMG001 | 3 5 10-12 30 33 36 38-39 44 55 58 63 69 71 74 87 95-96 102 116 |
| gland | | | 124 |
| induced | Stratagene | NTD001 | 33 55 71 84 102 110 114-115 |
| neuron-cells | | | |
| retinoic acid- | Stratagene | NTR001 | 5 55 59 69 |
| induced- | | | |
| neuronal-cells | | | |
| neuronal cells | Stratagene | NTU001 | 10 55 71 106-107 |
| pituitary gland | Clontech | PIT004 | 3 68 71 122 |
| placenta | Clontech | PLA003 | 4 17 57 69 113 121 |
| prostate | Clontech | PRT001 | 11 18 64-67 71 74 113 |
| rectum | Invitrogen | REC001 | 3 12 29 35 44 58 |
| salivary gland | Clontech | SAL001 | 10-12 15 67 71 82 116 122 |
| skin fibroblast | ATCC | SFB002 | 122 |
| small intestine | Clontech | SIN001 | 3 18 38-39 44 53 55 59 62 64-66 71 100 102 116 122 124 |
| skeletal muscle | Clontech | SKM001 | 71 73-74 87 91 112 114-115 |
| spinal cord | Clontech | SPC001 | 3 33 59 63 68 71 75 80 102 105 110 116 122 124 |
| adult spleen | Clontech | SPLc01 | 11-12 18 23 38-39 63 71 |
| stomach | Clontech | STO001 | 10-11 44 71 |
| thalamus | Clontech | THA002 | 36 58 71 78 124 |
| thymus | Clontech | THM001 | 3 5 10 30 33 55 64-67 71 91 100 106 116 124 |
| thymus | Clontech | THMc02 | 5 11 23-24 36 38-39 43 45 47 55 59-60 63 71-72 93 113 |
| thyroid gland | Clontech | THR001 | 9-11 23 25 33 38-39 55 63 67 69 71 74 82 85 91 93 105 122-123 |
| trachea | Clontech | TRC001 | 5 60 71 |
| uterus | Clontech | UTR001 | 3 10 71 102 |

[0465] The 16 tissue/mRNAs and their vendor sources are as follows: 1) Normal adult brain mRNA (Invitrogen), 2) Normal adult kidney mRNA (Invitrogen), 3) Normal fetal brain mRNA (Invitrogen), 4) Normal adult liver mRNA (Invitrogen), 5) Normal fetal kidney mRNA (Invitrogen), 6) Normal fetal liver mRNA (Invitrogen), 7) normal fetal skin mRNA (Invitrogen), 8) human adrenal gland mRNA (Clontech), 9) Human bone marrow mRNA (Clontech), 10) Human leukemia lymphoblastic rnRNA (Clontech), 11) Human thymus rnRNA (Clontech), 12) human lymph node mRNA (Clontech), 13) human sospinal cord mRNA (Clontech), 14) human thyroid inRNA (Clontech), 15) human esophagus mRNA (BioChainl), 16) human conceptional umbilical cord mRNA (BioChain).

TABLE 2

| SEQ ID NO: | Accession No. | Species | Description | Score | % identity |
|---|---|---|---|---|---|
| 125 | AAY27616 | Homo sapiens | Human secreted protein encoded by | 562 | 99 |
| | | | gene No. 50. | | |
| 125 | gi12957417 | Casuarius | ATPase subunit 8 | 62 | 35 |
| | | bennetti | | | |
| 125 | gi332009 | Murine | p15-gag protein | 57 | 27 |
| | | leukemia virus | | | |
| 126 | gi15822827 | Homo sapiens | mRNA for pendrin-like protein 1, | 1154 | 39 |
| | | | complete cds. | | |
| 126 | gi13344999 | Homo sapiens | solute carrier family 26 member 6 | 1300 | 37 |
| | | | (SLC26A6) mRNA, complete cds. | | |
| 126 | AAY71067 | Homo sapiens | Human membrane transport protein, | 1297 | 37 |
| | | | MTRP-12. | | |
| 127 | AAY57945 | Homo sapiens | Human transmembrane protein | 780 | 100 |
| | | | HTMPN-69. | | |
| 127 | AAY76141 | Homo sapiens | Human secreted protein encoded by | 780 | 100 |
| | | | gene 18. | | |
| 127 | AAB24037 | Homo sapiens | Human PRO 1555 protein sequence | 356 | 47 |
| | | | SEQ ID NO:49. | | |
| 128 | AAY59672 | Homo sapiens | Secreted protein 108-006-5-0-E6-FL. | 553 | 83 |
| 128 | gi10435214 | Homo sapiens | cDNA FLJ13263 fis, clone | 549 | 82 |
| | | | OVARC1000924. | | |
| 128 | AAB94543 | Homo sapiens | Human protein sequence SEQ ID | 549 | 82 |
| | | | NO:15290. | | |
| 129 | AAY92710 | Homo sapiens | Human membrane-associated protein | 704 | 97 |
| | | | Zsig24. | | |
| 129 | AAY87250 | Homo sapiens | Human signal peptide containing | 566 | 99 |
| | | | protein HSPP-27 SEQ ID NO:27. | | |
| 129 | AAG00627 | Homo sapiens | Human secreted protein, SEQ ID | 260 | 100 |
| | | | NO:4708. | | |
| 130 | AAY99452 | Homo sapiens | Human PRO 1693 (UNQ803) amino | 1670 | 63 |
| | | | acid sequence SEQ ID NO:385. | | |
| 130 | AAB87587 | Homo sapiens | Human PRO 1693. | 1670 | 63 |
| 130 | AAY66713 | Homo sapiens | Membrane-bound protein PR01309. | 1204 | 47 |
| 131 | gi14572521 | Homo sapiens | NEPH1 (NEPH1) mRNA, complete | 1512 | 51 |
| | | | cds. | | |
| 131 | AAB37996 | Homo sapiens | Human secreted protein encoded by | 1164 | 92 |
| | | | gene 13 clone HIBEU15. | | |
| 131 | gi10434261 | Homo sapiens | cDNA FLJ12646 fis, clone | 1035 | 41 |
| | | | NT2RM4001987, weakly similar to | | |
| | | | NEURAL CELL ADHESION | | |
| | | | MOLECULE 1, LARGE ISOFORM | | |
| | | | PRECURSOR. | | |
| 132 | gi29806 | Homo sapiens | Human mRNA for CD59, an LY-6- | 710 | 100 |
| | | | like protein regulating complement | | |
| | | | membrane attack. | | |
| 132 | gi825637 | Homo sapiens | H.sapiens gene for CD59 protein, | 710 | 100 |
| | | | exon 2. | | |
| 132 | gi29815 | Homo sapiens | Human mRNA for CD59 antigen. | 710 | 100 |
| 133 | gi6841140 | Homo sapiens | HSPG100 mRNA, partial cds. | 498 | 100 |
| 133 | gi2828808 | Bacillus | glucose transporter | 111 | 25 |
| | | subtilis | | | |
| 133 | gi9106658 | Xylella | glucose/galactose transporter | 140 | 23 |
| | | fastidiosa 9a5c | | | |
| 134 | AAB56632 | Homo sapiens | Human prostate cancer antigen | 3377 | 99 |
| | | | protein sequence SEQ ID NO:1210. | | |
| 134 | gi13097708 | Homo sapiens | ribophorin II, clone MGC: 1817 | 3152 | 100 |
| | | | IMAGE: 3546673, mRNA, complete | | |
| | | | cds. | | |
| 134 | gi5834424 | Homo sapiens | RIBIIR gene (partial), exon 1 and | 3152 | 100 |
| | | | joined CDS. | | |
| 135 | gil3182757 | Homo sapiens | HTPAP mRNA, complete cds. | 598 | 100 |
| 135 | AAG89279 | Homo sapiens | Human secreted protein, SEQ ID | 598 | 100 |
| | | | NO:399. | | |
| 135 | AAB70690 | Homo sapiens | Human hDPP protein sequence SEQ | 598 | 100 |
| | | | ID NO:7. | | |
| 136 | gi2276448 | Homo sapiens | Human MHC class I HLA-A (HLA- | 1794 | 93 |
| | | | A-0302-new allele) mRNA, complete | | |
| | | | cds. | | |
| 136 | gi6815812 | Homo sapiens | MHC class I antigen heavy chain | 1794 | 93 |
| | | | (HLA-A) mRNA, HLA-A*0302 | | |
| | | | allele, complete cds. | | |
| 136 | gi1245460 | Homo sapiens | Human MHC class I HLA-A allele | 1786 | 92 |
| | | | (HLA-A) mRNA, complete cds. | | |
| 137 | AAB95392 | Homo sapiens | Human protein sequence SEQ ID | 567 | 78 |
| | | | NO:17743. | | |
| 137 | AAB29645 | Homo sapiens | Human membrane-associated protein | 548 | 70 |
| | | | HUMAP-2. | | |
| 137 | AAB95049 | Homo sapiens | Human protein sequence SEQ ID | 396 | 78 |
| | | | NO:16845. | | |
| 138 | gi14017773 | Musmusculus | Cgl0671-like | 1517 | 96 |
| 138 | gi14017764 | Musmusculus | CG10671-like | 1517 | 96 |
| 138 | gi16198091 | Drosophila | LD30661p | 184 | 30 |
| | | | melanogaster | | |
| 139 | AAG81431 | Homo sapiens | Human AEP protein sequence SEQ | 503 | 97 |
| | | | ID NO:380. | | |
| 139 | gi6707026 | Monodelphis | immunoglobulin light chain kappa | 108 | 26 |
| | | domestica | | | |
| 139 | gi6653413 | Oryctolagus | immunoglobulin light chain VJ | 102 | 27 |
| | | cuniculus | kappa region | | |
| 140 | gi12836893 | Gallus gallus | IPR328-like protein | 158 | 29 |
| 140 | gi3093433 | Homo sapiens | Chromosome 16 BAC clone | 151 | 29 |
| | | | CIT987SK-625P11, complete | | |
| | | | sequence. | | |
| 140 | gi4558766 | Homo sapiens | neuronal voltage gated calcium | 151 | 29 |
| | | | channel gamma-3 subunit mRNA, | | |
| | | | complete cds. | | |
| 141 | gi4337100 | Homo sapiens | M5H55 gene, partial cds; and | 400 | 100 |
| | | | CLIC1, DDAH, G6b, G6c, G5b, | | |
| | | | G6d, G6e, G6f, BAT5, G5b, CSK2B, | | |
| | | | BAT4, G4, Apo M, BAT3, BAT2, | | |
| | | | AIF-1, 1C7, LST-1, LTB, TNF, and | | |
| | | | LTA genes, complete cds. | | |
| 141 | gi5304878 | Homo sapiens | genes encoding RNCC protein, | 400 | 100 |
| | | | DDAH protein, Ly6-C protein, Ly6- | | |
| | | | D protein and immunoglobulin | | |
| | | | receptor. | | |
| 141 | AAY27597 | Homo sapiens | Human secreted protein encoded by | 400 | 100 |
| | | | gene No. 31. | | |
| 142 | AAB88325 | Homo sapiens | Human membrane or secretory | 912 | 99 |
| | | | protein clone PSEC0020. | | |
| 142 | AAB53257 | Homo sapiens | Human colon cancer antigen protein | 859 | 99 |
| | | | sequence SEQ ID NO:797. | | |
| 142 | gi13325409 | Homo sapiens | clone IMAGE:3845253, mRNA, | 774 | 100 |
| | | | partial cds. | | |
| 143 | gi1234787 | Xenopus | up-regulated by thyroid hormone in | 917 | 61 |
| | | laevis | tadpoles; expressed specifically in | | |
| | | | the tail and only at metamorphosis; | | |
| | | | membrane bound or extracellular | | |
| | | | protein; C-terminal basic region | | |
| 143 | gi10435980 | Homo sapiens | cDNA FLJ13840 fis, clone | 812 | 62 |
| | | | THYRO 1000783, moderately similar | | |
| | | | to Xenopus laevis tail-specific | | |
| | | | thyroid hormone up-regulated (gene | | |
| | | | 5) mRNA. | | |
| 143 | AAB94773 | Homo sapiens | Human protein sequence SEQ ID | 812 | 62 |
| | | | NO:15860. | | |
| 144 | gi4099139 | Homo sapiens | Human P2X4 purinoreceptor gene, | 2014 | 100 |
| | | | exons 9, 10, 11 and 12 and complete | | |
| | | | cds. | | |
| 144 | gi4099121 | Homo sapiens | Human P2X4 purinoreceptor mRNA, | 2014 | 100 |
| | | | complete cds. | | |
| 144 | AAW47066 | Homo sapiens | Human brain P2X-1 receptor | 2014 | 100 |
| | | | polypeptide. | | |
| 145 | AAE03560 | Homo sapiens | Human differentially expressed | 1020 | 99 |
| | | | kidney cDNA 22360 encoded | | |
| | | | protein. | | |
| 145 | gi15637151 | Beta vulgaris | glycine decarboxylase subunit P | 62 | 36 |
| 145 | gi5824822 | Caenorhabditis | Y53F4A.2 | 62 | 25 |
| | | elegans | | | |
| 146 | gi972946 | Mus musculus | ZP1 precursor | 2217 | 67 |
| 146 | gi1113794 | Mus musculus | zona pellucida | 2210 | 67 |
| 146 | gi2804566 | Rattus | zona pellucida 1 glycoprotein | 2200 | 67 |
| | | | norvegicus | | |
| 147 | gi15779156 | Homo sapiens | Similar to RIKEN cDNA | 1858 | 100 |
| | | | 1810073N04 gene, clone | | |
| | | | MGC:15523 IMAGE:3028844, | | |
| | | | mRNA, complete cds. | | |
| 147 | gi13097045 | Mus musculus | Similar to RIKEN cDNA | 1719 | 91 |
| | | | 1810073N04 gene | | |
| 147 | gi603254 | Saccharomyces | Ye1064cp | 319 | 27 |
| | | cerevisiae | | | |
| 148 | AAW03516 | Homo sapiens | Prostaglandin DP receptor. | 1467 | 100 |
| 148 | gi940379 | Homo sapiens | Human DP prostanoid receptor | 1467 | 100 |
| | | | (PTGDR) gene, 5′ region and partial | | |
| | | | cds. | | |
| 148 | gi4567038 | Rattus | prostaglandin D2 receptor | 1127 | 77 |
| | | norvegicus | | | |
| 149 | gi2811122 | Xenopus | NaDC-2 | 1274 | 56 |
| | | laevis | | | |
| 149 | gi1098557 | Homo sapiens | Human renal sodium/dicarboxylate | 1618 | 55 |
| | | | cotransporter (NADC1) mRNA, | | |
| | | | complete cds. | | |
| 149 | gi3168585 | Rattus | sodium-dependent dicarboxylate | 1614 | 54 |
| | | norvegicus | transporter | | |
| 150 | gi3036840 | Homo sapiens | mRNA for cystinosm. | 1686 | 88 |
| 150 | gi3036851 | Homo sapiens | GTNS gene, exon 3, flanking intronic | 1686 | 88 |
| | | | regions and joined CDS. | | |
| 150 | gi7239176 | Homo sapiens | vanilloid receptor gene, partial | 1686 | 88 |
| | | | sequence; CARKL and CTNS genes, | | |
| | | | complete cds; TIP1 gene, partial cds; | | |
| | | | P2X5b and P2X5a genes, complete | | |
| | | | cds; and HUMINAE gene, partial | | |
| | | | cds. | | |
| 151 | gi41077 | Escherichia | cal protein precursor (aa 1-51) | 63 | 42 |
| | | coli | | | |
| 151 | gi6474978 | Schizosaccharomyces | Amino acid permease | 62 | 27 |
| | | pombe | | | |
| 151 | AAB40157 | Homo sapiens | Human secreted protein sequence | 60 | 27 |
| | | | encoded by gene 7 SEQ ID NO:67. | | |
| 152 | AAY36071 | Homo sapiens | Extended human secreted protein | 1252 | 92 |
| | | | sequence, SEQ lD NO.456. | | |
| 152 | gi15990604 | Homo sapiens | RAE-1-like transcript 4 mRNA, | 1022 | 97 |
| | | | complete cds. | | |
| 152 | AAG00501 | Homo sapiens | Human secreted protein, SEQ ID | 533 | 95 |
| | | | NO:4582. | | |
| 153 | gi14290560 | Homo sapiens | Similar to transmembrane 7 | 1548 | 98 |
| | | | superfamily member 2, clone | | |
| | | | MGC:9286 IMAGE:3874367, | | |
| | | | mRNA, complete cds. | | |
| 153 | gi15277509 | Homo sapiens | Similar to transmembrane 7 | 1548 | 97 |
| | | | superfamily member 2, clone | | |
| | | | MGC:17157 IMAGE:4214662, | | |
| | | | mRNA, complete cds. | | |
| 153 | gi3211722 | Homo sapiens | lamin B receptor homolog TM7SF2 | 1132 | 77 |
| | | | (TM7SF2) mRNA, complete cds. | | |
| 155 | AAE06611 | Homo sapiens | Human protein having hydrophobic | 1552 | 99 |
| | | | domain, HP03696. | | |
| 155 | gi13676372 | Homo sapiens | clone MGC:4595 IMAGE:3345729, | 469 | 50 |
| | | | mRNA, complete cds. | | |
| 155 | AAY41690 | Homo sapiens | Human PRo329 protein sequence. | 469 | 50 |
| 156 | AAG72119 | Homo sapiens | Human olfactory receptor | 1036 | 181 |
| | | | polypeptide, SEQ ID NO:1800. | | |
| 156 | gi3769616 | Rattus | olfactory receptor | 887 | 81 |
| | | norvegicus | | | |
| 156 | gi12054453 | Homo sapiens | 6M1-18*01 gene for olfactory | 547 | 42 |
| | | | receptor, cell line BM28.7. | | |
| 157 | gi7106778 | Homo sapiens | HSPC194 | 530 | 95 |
| 157 | AAW64547 | Homo sapiens | Human stomach cancer cell clone | 530 | 95 |
| | | | HP1017S protein. | | |
| 157 | AAY35949 | Homo sapiens | Extended human secreted protein | 530 | 95 |
| | | | sequence, SEQ ID NO. 198. | | |
| 158 | gi402185 | Homo sapiens | H.sapiens ALK-2 mRNA. | 1572 | 100 |
| 158 | gi338219 | Homo sapiens | Human novel serine kinase receptor | 1572 | 100 |
| | | | mRNA, complete cds. | | |
| 158 | AAR85206 | Homo sapiens | Human ALK-2. | 1572 | 100 |
| 159 | gi4128041 | Homo sapiens | claudin-9 (CLDN9) gene. | 227 | 35 |
| 159 | AAB64401 | Homo sapiens | Amino acid sequence of human | 227 | 35 |
| | | | intracellular signalling molecule | | |
| | | | TNTRA33. | | |
| 159 | gi4325296 | Mus musculus | claudin-9 | 214 | 34 |
| 160 | gi1405893 | Homo sapiens | H.sapiens MICA gene. | 1896 | 93 |
| 160 | AAW60043 | Homo sapiens | Human MHC class I chain-related | 1896 | 93 |
| | | | gene A (MICA) polypetide. | | |
| 160 | gi508492 | Homo sapiens | Human MHC class I-related protein | 1838 | 90 |
| | | | mRNA, complete cds. | | |
| 161 | gi15292437 | Drosophila | LP10272p | 444 | 39 |
| | | melanogaster | | | |
| 161 | gi4877582 | Homo sapiens | lipoma HMGIC fusion partner | 221 | 28 |
| | | | (LHFP) mRNA, complete cds. | | |
| 161 | AAY87336 | Homo sapiens | Human signal peptide containing | 221 | 28 |
| | | | protein HSPP-113 SEQ ID NO:113. | | |
| 162 | AAB58289 | Homo sapiens | Lung cancer associated polypeptide | 1338 | 100 |
| | | | sequence SEQ ID 627. | | |
| 162 | AAY29332 | Homo sapiens | Human secreted protein clone | 1338 | 100 |
| | | | pe584 2 protein sequence. | | |
| 162 | AAB75295 | Homo sapiens | Human secreted protein sequence | 1247 | 100 |
| | | | encoded by gene 7 SEQ ID NO:114. | | |
| 163 | AAB58289 | Homo sapiens | Lung cancer associated polypeptide | 1338 | 100 |
| | | | sequence SEQ ID 627. | | |
| 163 | AAY29332 | Homo sapiens | Human secreted protein clone | 1338 | 100 |
| | | | pe584 2 protein sequence. | | |
| 163 | AAB75295 | Homo sapiens | Human secreted protein sequence | 1247 | 100 |
| | | | encoded by gene 7 SEQ ID NO:114. | | |
| 164 | AAE04780 | Homo sapiens | Human vesicle trafficking protein-23 | 864 | 100 |
| | | | (VETRP-23) protein. | | |
| 164 | AAB28629 | Homo sapiens | Human B11Ag1 antigen splice | 546 | 39 |
| | | | isoform B11C-8. | | |
| 164 | AAB28630 | Homo sapiens | Human B11Ag1 antigen splice | 546 | 39 |
| | | | isoform B11C-9-16. | | |
| 165 | gi15811373 | Mus musculus | G protein coupled receptor affecting | 1269 | 83 |
| | | | testicular descent | | |
| 165 | gi10441730 | Homo sapiens | leucine-rich repeat-containing G | 1004 | 62 |
| | | | protein-coupled receptor 7 (LGR7) | | |
| | | | mRNA, complete cds. | | |
| 165 | AAY42170 | Homo sapiens | Human LGR7 long form protein | 1004 | 62 |
| | | | sequence. | | |
| 166 | gi13544043 | Homo sapiens | clone IMAGE:3627317, mRNA, | 1257 | 52 |
| | | | partial cds. | | |
| 166 | gi14249892 | Homo sapiens | spinster-like protein, clone | 1257 | 52 |
| | | | MGC: 15767 IMAGE: 3501826, | | |
| | | | mRNA, complete cds. | | |
| 166 | gi12003980 | Homo sapiens | spinster-like protein mRNA, | 1257 | 52 |
| | | | complete cds. | | |
| 167 | AAB85029 | Homo sapiens | Protein encoded by BAP28 cDNA | 1618 | 68 |
| | | | consisting of exons 1 to 45. | | |
| 167 | AAW54099 | Homo sapiens | Homo sapiens BAP28 sequence. | 1617 | 67 |
| 167 | gi7022341 | Homo sapiens | cDNA FLJ10359 fis, clone | 1588 | 92 |
| | | | NT2RM2001243. | | |
| 168 | gi13491841 | Rattus | gamma-glutamyltranspeptidase-like | 209 | 34 |
| | | norvegicus | protein | | |
| 168 | AAG75266 | Homo sapiens | Human colon cancer antigen protein | 217 | 100 |
| | | | SEQ ID NO:6030. | | |
| 168 | gi57806 | Rattus sp. | gamma-glutamyltranspeptidase (AA | 186 | 33 |
| | | | 1-568) | | |
| 169 | gi5262646 | Homo sapiens | mRNA; cDNA DKLFZp434I091 | 2917 | 100 |
| | | | (from clone DKFZp43 41091); partial | | |
| | | | cds, | | |
| 169 | gi6807820 | Homo sapiens | mRNA; cDNA DKFZp434A2372 | 629 | 100 |
| | | | (from clone DKFZp434A2372); | | |
| | | | partial cds. | | |
| 169 | gi1408182 | Homo sapiens | Human LGN protein mRNA, | 282 | 31 |
| | | | complete cds. | | |
| 170 | gi4878022 | Homo sapiens | acyl-coenzyme A: cholesterol | 930 | 98 |
| | | | acyltransferase mRNA, complete | | |
| | | | cds. | | |
| 170 | AAR53079 | Homo sapiens | Acetyl coenzyme A: cholesterol | 925 | 98 |
| | | | acetyltransferase (ACAT). | | |
| 170 | AAW38416 | Homo sapiens | Human acyl-coenzyme A: cholesterol | 925 | 98 |
| | | | acyltransferase I. | | |
| 171 | gi458938 | Saccharomyces | Yhr186cp | 1004 | 58 |
| | | cerevisiae | | | |
| 171 | gi5921144 | Schizosacchar | mip1 | 2049 | 52 |
| | | omyces pombe | | | |
| 171 | gi9366720 | Trypanosoma | possible t06o11.22 protein. | 277 | 45 |
| | | brucei | | | |
| 172 | gi402187 | Homo sapiens | H.sapiens ALK-3 mRNA. | 1664 | 99 |
| 172 | AAR55368 | Homo sapiens | Human Activin receptor-like kinase 3 | 1664 | 99 |
| | | | (hALK-3). | | |
| 172 | AAR85207 | Homo sapiens | Human ALK-3. | 1664 | 99 |
| 173 | gi609354 | Xenopus | BMP receptor | 1485 | 90 |
| | | laevis | | | |
| 173 | gi2446992 | Xenopus | ‘BMP receptor’ | 1483 | 89 |
| | | laevis | | | |
| 173 | gi3551073 | Danio rerio | type I serin/threonine kinase receptor | 1451 | 87 |
| 174 | AAW90873 | Homo sapiens | Human brain-specific dysferlin | 1340 | 53 |
| | | | protein. | | |
| 174 | gi3600028 | Homo sapiens | dysferlin mRNA, complete cds. | 1340 | 53 |
| 174 | AAY82643 | Homo sapiens | Human dysferlin protein sequence | 1340 | 53 |
| | | | SEQ ID NO:2. | | |
| 175 | gi3600028 | Homo sapiens | dysferlin mRNA, complete cds. | 1866 | 49 |
| 175 | AAY82643 | Homo sapiens | Human dysferlin protein sequence | 1866 | 49 |
| | | | SEQ ID NO:2. | | |
| 175 | AAW90868 | Homo sapiens | Human dysferlin protein. | 1866 | 49 |
| 176 | AAY92321 | Homo sapiens | Human alpha-2-delta-D calcium | 5881 | 99 |
| | | | channel subunit. | | |
| 176 | AAB62262 | Homo sapiens | Human calcium channel alpha2delta | 5745 | 99 |
| | | | subunit. | | |
| 176 | AAY92323 | Homo sapiens | Human alpha-2-delta-D polypeptide | 4976 | 99 |
| | | | from splice variant 1. | | |
| 177 | gi2104689 | Mus musculus | alpha glucosidase II, alpha subunit | 1796 | 55 |
| 177 | gi1890664 | Sus scrofa | glucosidase II | 1792 | 55 |
| 177 | gi7672977 | Homo sapiens | glucosidase II alpha subunit mRNA, | 1783 | 55 |
| | | | complete cds. | | |
| 178 | AAY01143 | Homo sapiens | Secreted protein encoded by gene 9 | 238 | 100 |
| | | | clone HSIDY06. | | |
| 178 | gi6692409 | Otus | cytochrome b | 64 | 38 |
| | | longicornis | | | |
| 178 | gi10312185 | Otus watsonii | cytochrome b | 61 | 43 |
| 179 | gi13477285 | Homo sapiens | structure specific recognition protein | 3683 | 100 |
| | | | 1, clone MGC: 1608 | | |
| | | | IMAGE: 3536048, mRNA, complete | | |
| | | | cds. | | |
| 179 | gi184242 | Homo sapiens | Human high mobility group box | 3683 | 100 |
| | | | (SSRP1) mRNA, complete cds. | | |
| 179 | AAR38744 | Homo sapiens | Human SSRP. | 3683 | 100 |
| 180 | gi177814 | Homo sapiens | Human alpha-1-antitrypsin-related | 1925 | 90 |
| | | | protein gene, exons 3, 4 and 5. | | |
| 180 | AAP50132 | Homo sapiens | Sequence of the predominant form of | 828 | 59 |
| | | | human alpha-1-antitrypsin(AT). | | |
| 180 | gi15990507 | Homo sapiens | Similar to serine (or cysteine) | 1409 | 66 |
| | | | proteinase inhibitor, dade A (alpha-1 | | |
| | | | antiproteinase, antitrypsin), member | | |
| | | | 1, clone MGC: 23330 | | |
| | | | IMAGE: 4644658, mRNA, complete | | |
| | | | cds. | | |
| 181 | AAB56819 | Homo sapiens | Human prostate cancer antigen | 1054 | 100 |
| | | | protein sequence SEQ ID NO:1397. | | |
| 181 | gi15981490 | Yersinia pestis | protease | 137 | 28 |
| 181 | gi9654995 | Vibrio | protease DegS | 135 | 29 |
| | | cholerae | | | |
| 182 | gi13543976 | Homo sapiens | clone IMAGE:3603998, mRNA, | 1523 | 100 |
| | | | partial cds. | | |
| 182 | gi15930240 | Homo sapiens | Similar to CAP-binding protein | 1523 | 100 |
| | | | complex interacting protein 2, clone | | |
| | | | MGC:9962 IMAGE: 3878011, | | |
| | | | mRNA, complete cds. | | |
| 182 | AAY57946 | Homo sapiens | Human transmembrane protein | 1128 | 100 |
| | | | HTMPN-70. | | |
| 183 | AAY53031 | Homo sapiens | Human secreted protein clone | 590 | 93 |
| | | | dd426_1 protein sequence SEQ ID | | |
| | | | NO:68. | | |
| 183 | AAY71062 | Homo sapiens | Human membrane transport protein, | 158 | 26 |
| | | | MTRP-7. | | |
| 183 | gi15529155 | Arabidopsis | AT3830390/T6J22_16 | 135 | 22 |
| | | thaliana | | | |
| 184 | gi4959568 | Homo sapiens | nuclear pore complex interacting | 1650 | 94 |
| | | | protein NPIP (NPIP) mRNA, | | |
| | | | complete cds. | | |
| 184 | gi2342743 | Homo sapiens | Human Chromosome 16 BAC clone | 1627 | 93 |
| | | | CIT987SK-A-589H1, complete | | |
| | | | sequence. | | |
| 184 | AAY10912 | Homo sapiens | Amino acid sequence of a human | 760 | 88 |
| | | | secreted peptide. | | |
| 185 | gi7022118 | Homo sapiens | cDNA FLJ10213 fis, clone | 1074 | 99 |
| | | | HEMBA1006474, weakly similar to | | |
| | | | 40 KD PROTEIN. | | |
| 185 | AAB92609 | Homo sapiens | Human protein sequence SEQ ID | 1074 | 99 |
| | | | NO:10874. | | |
| 185 | gi456886 | Borna disease | p40 | 396 | 41 |
| | | virus | | | |
| 186 | gi38432 | Homo sapiens | H.sapiens gene for mitochondrial | 612 | 90 |
| | | | ATP synthase c subunit (P2 form). | | |
| 186 | gi285910 | Homo sapiens | P2 mRNA for ATP synthase subunit | 612 | 90 |
| | | | c, complete cds. | | |
| 186 | AAB43694 | Homo sapiens | Human cancer associated protein | 612 | 90 |
| | | | sequence SEQ ID NO:1139. | | |
| 187 | gi897827 | Homo sapiens | Human iron-responsive element- | 4968 | 99 |
| | | | binding protein/iron regulatory | | |
| | | | protein 2 (IRE-BP2/IRP2) mRNA, | | |
| | | | partial cds. | | |
| 187 | gi897581 | Homo sapiens | Human iron-regulatory protein 2 | 4909 | 99 |
| | | | (IRP2) mRNA, partial cds. | | |
| 187 | gi897583 | Rattus | iron-regulatory protein 2 | 4700 | 93 |
| | | norvegicus | | | |
| 188 | gi5732908 | Homo sapiens | BPAG1n3 (BPAG1) mRNA, partial | 75 | 32 |
| | | | cds. | | |
| 188 | AAY87302 | Homo sapiens | Human signal peptide containing | 61 | 35 |
| | | | protein HSPP-79 SEQ ID NO:79. | | |
| 188 | AAY76213 | Homo sapiens | Human secreted protein encoded by | 61 | 35 |
| | | | gene 90. | | |
| 189 | gi5732908 | Homo sapiens | BPAG1n3 (BPAG1) mRNA, partial | 75 | 32 |
| | | | cds. | | |
| 189 | AAY87302 | Homo sapiens | Human signal peptide containing | 61 | 35 |
| | | | protein HSPP-79 SEQ ID NO:79. | | |
| 189 | AAY76213 | Homo sapiens | Human secreted protein encoded by | 61 | 35 |
| | | | gene 90. | | |
| 190 | gi5732908 | Homo sapiens | BPAG1n3 (BPAG1) mRNA, partial | 75 | 32 |
| | | | cds. | | |
| 190 | AAY87302 | Homo sapiens | Human signal peptide containing | 61 | 35 |
| | | | protein HSPP-79 SEQ ID NO:79. | | |
| 190 | AAY76213 | Homo sapiens | Human secreted protein encoded by | 61 | 35 |
| | | | gene 90. | | |
| 191 | AAY86234 | Homo sapiens | Human secreted protein HNTNC20, | 88 | 31 |
| | | | SEQ ID NO:149. | | |
| 191 | gi5430769 | Arabidopsis | Similar to somatic embryogenesis | 88 | 32 |
| | | thaliana | receptor-like kinase | | |
| 191 | AAB24074 | Homo sapiens | Human PRO1153 protein sequence | 79 | 22 |
| | | | SEQ ID NO:49. | | |
| 192 | gi13447199 | Homo sapiens | spbingosine-1-phosphate | 1931 | 98 |
| | | | phosphatase mRNA, complete cds. | | |
| 192 | gi9623190 | Mus musculus | sphingosine-1-phosphate | 1692 | 83 |
| | | | phosphohydrolase | | |
| 192 | gi15778670 | Mus musculus | sphingosine-1-phosphate | 1692 | 83 |
| | | | phosphatase | | |
| 193 | gi12052824 | Homo sapiens | mRNA; cDNA DKFZp564H1562 | 1544 | 100 |
| | | | (from clone DKFZp564H1562); | | |
| | | | complete ods. | | |
| 193 | gi5326797 | Homo sapiens | junctional adhesion molecule | 1544 | 100 |
| | | | (JAM1) mRNA, complete cds. | | |
| 193 | gi5731339 | Homo sapiens | junctional adhesion molecule-1 | 1544 | 100 |
| | | | mRNA, complete cds. | | |
| 194 | gi296636 | Homo sapiens | Human apoC-II gene for | 506 | 100 |
| | | | preproapolipoprotein C-II. | | |
| 194 | gi757915 | Homo sapiens | Human mRNA for lipoprotein | 506 | 100 |
| | | | apoCII. | | |
| 194 | gi178836 | Homo sapiens | APOC2 gene, complete sequence; | 506 | 100 |
| | | | and apolipoprotein C-II (APOC2) | | |
| | | | gene, complete cds. | | |
| 195 | gi13097159 | Homo sapiens | tumor protein, translationally- | 794 | 97 |
| | | | controlled 1, clone MGC: 5308 | | |
| | | | IMAGE: 2899964, mRNA, complete | | |
| | | | cds. | | |
| 195 | gi7573519 | Homo sapiens | TPT1 gene for translationally | 794 | 97 |
| | | | controlled tumor protein (TCTP), | | |
| | | | exons 1-6. | | |
| 195 | gi37496 | Homo sapiens | Human mRNA for translationally | 794 | 97 |
| | | | controlled tumor protein. | | |
| 196 | gi12082725 | Mus musculus | B cell phosphoinositide 3-kinase | 3523 | 84 |
| | | | adaptor | | |
| 196 | gi12082723 | Gallus gallus | B cell phosphoinositide 3-kinase | 2821 | 69 |
| | | | adaptor | | |
| 196 | AAB43816 | Homo sapiens | Human cancer associated protein | 1257 | 98 |
| | | | sequence SEQ ID NO:1261. | | |
| 197 | gi10177622 | Arabidopsis | gene_id: K6M13.11˜ | 201 | 39 |
| | | | thaliana | | |
| 197 | gi10437414 | Homo sapiens | cDNA: FLJ21330 fis, clone | 165 | 34 |
| | | | COL02466. | | |
| 197 | gi499199 | Schizosacchar | uvi22 | 155 | 33 |
| | | omyces pombe | | | |
| 198 | gi13436446 | Homo sapiens | myosin regulatory light chain, clone | 881 | 99 |
| | | | MGC: 4405 IMAGE: 2906108, | | |
| | | | mRNA, complete cds. | | |
| 198 | gi829623 | Homo sapiens | Human myosin regulatory light chain | 881 | 99 |
| | | | mRNA, complete cds. | | |
| 198 | gi15076511 | Homo sapiens | LC-2 mRNA for nonmuscle | 881 | 99 |
| | | | myosin light chain 2, complete cds. | | |
| 199 | gi5305502 | Mus musculus | phospholemman precursor | 153 | 45 |
| 199 | gi1916012 | Rattus | phospholemman chloride channel | 142 | 53 |
| | | norvegicus | | | |
| 199 | gi1916010 | Homo sapiens | Human phospholemman chloride | 133 | 47 |
| | | | channel mRNA, complete cds. | | |
| 200 | gi13272522 | Homo sapiens | transcription factor NYD-sp10 | 1344 | 90 |
| | | | mRNA, complete cds. | | |
| 200 | gi14278918 | Homo sapiens | mRNA for transcription factor | 1166 | 82 |
| | | | RFX4, complete cds. | | |
| 200 | gi583352 | synthetic | does not include the start ot stop | 162 | 29 |
| | | construct | codon | | |
| 201 | AAB47296 | Homo sapiens | PR04401 polypeptide. | 1062 | 58 |
| 201 | AAY22496 | Homo sapiens | Human secreted protein sequence | 1062 | 58 |
| | | | clone cn621 8. | | |
| 201 | gi14042441 | Homo sapiens | cDNA FLJ14724 fis, clone | 400 | 43 |
| | | | NT2RP3001716. | | |
| 202 | gi15341863 | Homo sapiens | Similar to RIKEN cDNA | 758 | 98 |
| | | | 2900052H21 gene, clone | | |
| | | | MGC: 21625 IMAGE: 4214683, | | |
| | | | mRNA, complete cds. | | |
| 202 | AAY33297 | Homo sapiens | Human membrane spanning protein | 758 | 98 |
| | | | MSP-4. | | |
| 202 | AAB61149 | Homo sapiens | Human NOV18 protein. | 758 | 98 |
| 203 | gi11125139 | Homo sapiens | Novel human gene mapping to | 476 | 89 |
| | | | chomosome 22. | | |
| 203 | AAY94914 | Homo sapiens | Human secreted protein clone | 476 | 89 |
| | | | pw337_6 protein sequence SEQ ID | | |
| | | | NO:34. | | |
| 203 | gi602584 | Methanosarcina | cytochrome b | 75 | 33 |
| | | mazei | | | |
| 204 | AAG72267 | Homo sapiens | Human olfactory receptor | 1281 | 100 |
| | | | polypeptide, SEQ ID NO:1948. | | |
| 204 | AAG72407 | Homo sapiens | Human OR-like polypeptide query | 1281 | 100 |
| | | | sequence, SEQ ID NO:2088. | | |
| 204 | AAG72270 | Homo sapiens | Human olfactory receptor | 997 | 73 |
| | | | polypeptide, SEQ ID NO:1951. | | |
| 205 | gi12002782 | Homo sapiens | olfactory receptor-like protein JCG2 | 1538 | 100 |
| | | | (JCG2) mRNA, partial cds. | | |
| 205 | gi12002784 | Homo sapiens | olfactory receptor-like protein JCG2 | 1538 | 100 |
| | | | (JCG2) gene, complete cds. | | |
| 205 | AAE04555 | Homo sapiens | Human G-protein coupled receptor- | 1538 | 100 |
| | | | 11 (GCREC-11) protein. | | |
| 206 | gi5802817 | Homo sapiens | endogenous retrovirus HERV-K104 | 479 | 77 |
| | | | long terminal repeat, complete | | |
| | | | sequence; and Gag protein (gag) and | | |
| | | | envelope protein (env) genes, | | |
| | | | complete cds. | | |
| 206 | gi1469243 | Human | pol/env | 466 | 77 |
| | | endogenous | | | |
| | | retrovirus K | | | |
| 206 | gi3150438 | Human | pol-env | 466 | 77 |
| | | endogenous | | | |
| | | retrovirus K | | | |
| 207 | AG89341 | Homo sapiens | Human secreted protein, SEQ ID | 501 | 99 |
| | | | NO:461. | | |
| 207 | gi6651037 | Mus nmsculus | similar to RNA binding protein | 411 | 96 |
| | | domesticus | | | |
| 207 | AAG02095 | Homo sapiens | Human secreted protein, SEQ ID | 167 | 55 |
| | | | NO:6176. | | |
| 208 | AAB20155 | Homo sapiens | Secreted protein SECP1. | 3983 | 51 |
| 208 | gi3080663 | Homo sapiens | PAC clone RP5-1168D11 from | 1408 | 47 |
| | | | 7p21-p22, complete sequence. | | |
| 208 | gi2897863 | Homo sapiens | BAC clone GS1-164B5 from 7p21- | 1340 | 50 |
| | | | p22, complete sequence. | | |
| 209 | gi32329 | Homo sapiens | Human HMG-17 gene for non- | 429 | 94 |
| | | | histone chromosomal protein HMG- | | |
| | | | 17. | | |
| 209 | gi306864 | Homo sapiens | Human non-histone chromosomal | 429 | 94 |
| | | | protein HMG-17 mRNA, complete | | |
| | | | cds. | | |
| 209 | AAB28199 | Homo sapiens | Human HMG-17 non histone | 429 | 94 |
| | | | chromosomal protein. | | |
| 210 | gi13905022 | Homo sapiens | Similar to interferon induced | 444 | 69 |
| | | | transmembrane protein 3 (1-8U), | | |
| | | | clone MGC: 5225 IMAGE: 2986145, | | |
| | | | mRNA, complete cds. | | |
| 210 | gi14250038 | Homo sapiens | Similar to interferon induced | 436 | 68 |
| | | | transmembrane protein 3 (1-8U, | | |
| | | | clone MGC: 14565 IMAGE: 4075453, | | |
| | | | mRNA, complete cds. | | |
| 210 | gi23398 | Homo sapiens | Human 1-8U gene from interferon- | 435 | 67 |
| | | | inducible gene family. | | |
| 211 | g17019933 | Homo sapiens | cDNA FLJ20071 fis, clone | 2163 | 100 |
| | | | COL01887. | | |
| 211 | AAB36618 | Homo sapiens | Human FLEXHT-40 protein | 1051 | 100 |
| | | | sequence SEQ ID NO:40. | | |
| 211 | AAW88957 | Homo sapiens | Polypeptide fragment encoded by | 902 | 100 |
| | | | gene 128. | | |
| 212 | AAB60112 | Homo sapiens | Human transport protein TPPT-32. | 775 | 100 |
| 212 | gi11558029 | Homo sapiens | boct gene for organic cation | 382 | 48 |
| | | | transporter. | | |
| 212 | gi9663117 | Homo sapiens | mRNA for organic cation transporter. | 382 | 48 |
| 213 | AAR28120 | Homo sapiens | NKG2 transmembrane protein-D. | 727 | 95 |
| 213 | gi2980865 | Homo sapiens | NKG2D gene, exons 2-5 and joined | 724 | 94 |
| | | | mRNA and CDS. | | |
| 213 | gi35063 | Homo sapiens | Human mRNA for NKG2-D gene. | 724 | 94 |
| 214 | gi7767239 | Homo sapiens | nectin-like protein 2 (NECL2) | 612 | 39 |
| | | | mRNA, complete cds. | | |
| 214 | gi4519602 | Homo sapiens | IGSF4 gene, exon 10 and complete | 609 | 38 |
| | | | cds. | | |
| 214 | AAY45092 | Homo sapiens | Human lymphoid derived dendritic | 609 | 38 |
| | | | cell adhesion molecule. | | |
| 215 | gi7020365 | Homo sapiens | cDNA FLJ20336 fis, clone | 4316 | 99 |
| | | | HEP11722. | | |
| 215 | gi10435830 | Homo sapiens | cDNA FLJ13727 fis, clone | 3079 | 99 |
| | | | PLACE3000103. | | |
| 215 | AAB94738 | Homo sapiens | Human protein sequence SEQ ID | 3079 | 99 |
| | | | NO:15776. | | |
| 216 | AAB75594 | Homo sapiens | Human secreted protein sequence | 678 | 99 |
| | | | encoded by gene 37 SEQ ID | | |
| | | | NO:148. | | |
| 216 | AAB75542 | Homo sapiens | Human secreted protein sequence | 294 | 100 |
| | | | encoded by gene 37 SEQ ID NO:96. | | |
| 216 | gi1864011 | Homo sapiens | mRNA for SHPS-1, complete cds. | 261 | 43 |
| 217 | gi7020372 | Homo sapiens | cDNA FLJ20340 fis, clone | 1692 | 99 |
| | | | HEP12374. | | |
| 217 | gi4098525 | Prochlorothrix | CytM | 80 | 31 |
| | | hollandica | | | |
| 217 | gi324932 | Influenza A | PA polymerase | 67 | 38 |
| | | virus | | | |
| 218 | gi7023403 | Homo sapiens | cDNA FLJ11006 fis, clone | 499 | 59 |
| | | | PLACE1003045. | | |
| 218 | AA393412 | Homo sapiens | Human protein sequence SEQ ID | 499 | 59 |
| | | | NO:12616. | | |
| 218 | gi13542919 | Mus musculus | Similar to mucolipin 1 | 432 | 61 |
| 219 | gi15488920 | Homo sapiens | Similar to PJKEN cDNA | 107 | 42 |
| | | | 2010107G23 gene, clone MGC: 9596 | | |
| | | | IMAGE: 3896656, mRNA, complete | | |
| | | | cds. | | |
| 219 | AAW74777 | Homo sapiens | Human secreted protein encoded by | 74 | 40 |
| | | | gene 48 clone H7FCAI74. | | |
| 219 | gi1304441 | Pseudorabies | Rsp40 | 69 | 32 |
| | | virus | | | |
| 220 | gi10119918 | Homo sapiens | brain otoferlin short isoform (OTOF) | 1315 | 49 |
| | | | mRNA, complete cds. | | |
| 220 | gi10119916 | Homo sapiens | brain otoferlin long isoform (OTOF) | 1315 | 49 |
| | | | mRNA, complete cds. | | |
| 220 | gi4588470 | Homo sapiens | otoferlin (OTOF) mRNA, complete | 2214 | 43 |
| | | | cds. | | |
| 221 | gi1006665 | Homo sapiens | H.sapiens mRNA for transcript | 442 | 98 |
| | | | associated with monocyte to | | |
| | | | macrophage differentiation. | | |
| 221 | gi15155898 | Agrobacterium | AGR_C_1653p | 167 | 31 |
| | | tumefaciens | | | |
| 221 | gi15023850 | Clostridium | Predicted membrane protein, | 117 | 44 |
| | | acetobutylicum | hemolysin III homolog | | |
| 222 | AAG71803 | Homo sapiens | Human olfactory receptor | 1494 | 92 |
| | | | polypeptide, SEQ ID NO:1484. | | |
| 222 | AAG71805 | Homo sapiens | Human olfactory receptor | 1205 | 92 |
| | | | polypeptide, SEQ ID NO:1486. | | |
| 222 | AAG71807 | Homo sapiens | Human olfactory receptor | 1178 | 70 |
| | | | polypeptide, SEQ ID NO:1488. | | |
| 223 | AAY70455 | Homo sapiens | Human membrane channel protein-5 | 609 | 91 |
| | | | (MECHP-5). | | |
| 223 | AAV83992_aa | Homo sapiens | Nucleic acid encoding a protein with | 608 | 92 |
| | 1 | | water channel activity. | | |
| 223 | gi2317274 | Homo sapiens | mRNA for aquaporin adipose, | 608 | 92 |
| | | | complete cds. | | |
| 224 | gi3319326 | Homo sapiens | protein associated with Myc mRNA, | 111 | 33 |
| | | | complete cds. | | |
| 225 | gi2463632 | Homo sapiens | monocarboxylate transporter | 2574 | 97 |
| | | | homologue MCT6 mRNA, complete | | |
| | | | cds. | | |
| 225 | gi10880482 | Mus musculus | monocarboxylate transporter 4 | 393 | 39 |
| 225 | gi2463634 | Homo sapiens | monocarboxylate transporter (MCT3) | 394 | 40 |
| | | | mRNA, complete cds. | | |
| 226 | gi13528675 | Homo sapiens | ATPase, H+ transporting, lysosomal | 705 | 94 |
| | | | (vacuolar proton pump) 16kD, clone | | |
| | | | MGC: 3723 IMAGE: 3618755, | | |
| | | | mRNA, complete cds. | | |
| 226 | gi13938484 | Homo sapiens | ATPase, H+ transporting, lysosomal | 705 | 94 |
| | | | (vacuolar proton pump) 16kD, clone | | |
| | | | MGC: 16271 IMAGE: 3831016, | | |
| | | | mRNA, complete cds. | | |
| 226 | gi14043553 | Homo sapiens | ATPase, H+ transporting, lysosomal | 705 | 94 |
| | | | (vacuolar proton pump) 16kD, clone | | |
| | | | MGC: 12873 IMAGE: 4127653, | | |
| | | | mRNA, complete cds. | | |
| 227 | gi15080314 | Homo sapiens | Similar to RIKEN cDNA | 514 | 100 |
| | | | 0610010D20 gene, clone | | |
| | | | MGC: 20590 IMAGE: 4310241, | | |
| | | | mRNA, complete cds. | | |
| 227 | gi10580053 | Halobacterium | dihydrodipicolinate synthase; DapA | 379 | 33 |
| | | sp. NRC-1 | | | |
| 227 | gi1590977 | Methanococcus | dihydrodipicolinate synthase (dapA) | 336 | 29 |
| | | jannaschii | | | |
| 228 | AAE06614 | Homo sapiens | Human protein having hydrophobic | 1394 | 100 |
| | | | domain, HP03974. | | |
| 228 | gi520469 | Oryctolagus | 597 aa protein related to Na/glucose | 1231 | 85 |
| | | cuniculus | cotransporters | | |
| 228 | gi338055 | Homo sapiens | Human Na+/glucose cotransporter 1 | 705 | 57 |
| | | | mRNA, complete cds. | | |
| 229 | gi6708478 | Mus musculus | formin-like protein | 1571 | 66 |
| 229 | gi4101720 | Mus musculus | lymphocyte specific formin related | 1543 | 65 |
| | | | protein | | |
| 229 | gi1914849 | Mus musculus | WW domain binding protein 3; | 299 | 54 |
| | | | WBP3 | | |
| 231 | gi12052738 | Homo sapiens | mRNA; cDNA DKFZp564H1322 | 1755 | 96 |
| | | | (from clone DKFZpS64H1322); | | |
| | | | complete cds. | | |
| 231 | gi10434632 | Homo sapiensc | DNA FLJ12886 fis, clone | 1755 | 96 |
| | | | NT2RP2004041, weakly similar to | | |
| | | | SYNAPSINS IA AND lB. | | |
| 231 | AAB94358 | Homo sapiens | Human protein sequence SEQ ID | 1755 | 96 |
| | | | NO:14883. | | |
| 232 | AAW54370 | Homo sapiens | G-protein coupled receptor | 1815 | 100 |
| | | | HLTEX11. | | |
| 232 | AAB64854 | Homo sapiens | Human secreted protein sequence | 1792 | 100 |
| | | | encoded by gene 36 SEQ ID | | |
| | | | NO:140. | | |
| 232 | AAW70504 | Homo sapiens | Leukocyte seven times membrane- | 821 | 46 |
| | | | penetrating type receptor protein | | |
| | | | JEG18. | | |
| 233 | gi15278128 | Mus musculus | chemokine-like factor 2 variant 2 | 412 | 49 |
| 233 | AAB51648 | Homo sapiens | Human secreted protein sequence | 410 | 100 |
| | | | encoded by gene 29 SEQ ID NO:88. | | |
| 233 | AAE03929 | Homo sapiens | Human gene 32 encoded secreted | 410 | 100 |
| | | | protein HTLIF 12, SEQ ID NO:92. | | |
| 235 | gi13477335 | Homo sapiens | vitamin A responsive; cytoskeleton | 777 | 95 |
| | | | related, clone MGC: 1917 | | |
| | | | IMAGE: 3510436, mRNA, complete | | |
| | | | cds. | | |
| 235 | gi3746652 | Homo sapiens | JWA protein mRNA, complete cds. | 777 | 95 |
| 235 | gi6563260 | Homo sapiens | jmx protein mRNA, complete cds. | 777 | 95 |
| 236 | gi2970431 | Florometra | NADH dehydrogenase subunit 4 | 94 | 31 |
| | | serratissima | | | |
| 236 | gi15042530 | Chilo | 450L | 70 | 24 |
| | | iridescent | | | |
| | | virus | | | |
| 236 | AAY87197 | Homo sapiens | Human secreted protein sequence | 90 | 27 |
| | | | SEQ ID NO:236. | | |
| 237 | AAB93562 | Homo sapiens | Human protein sequence SEQ ID | 2402 | 100 |
| | | | NO:12957. | | |
| 237 | gi7023538 | Homo sapiens | cDNA FLJ11091 fis, clone | 860 | 100 |
| | | | PLAGE1005313. | | |
| 237 | AAB93489 | Homo sapiens | Human protein sequence SEQ ID | 860 | 100 |
| | | | NO:12790. | | |
| 239 | gi10438431 | Homo sapiens | cDNA: FLJ22155 fis, clone | 1995 | 100 |
| | | | HRC00205. | | |
| 239 | gi10437336 | Homo sapiens | cDNA: FLJ2 1267 fis, clone | 1776 | 99 |
| | | | COL01717. | | |
| 239 | gi7020065 | Homo sapiens | cDNA FLJ20152 fis, clone | 705 | 100 |
| | | | C0L08515. | | |
| 240 | gi12654159 | Homo sapiens | interferon induced transmembrane | 569 | 93 |
| | | | protein 1 (9-27), clone MGC: 5195 | | |
| | | | IMAGE: 3464598, mRNA, complete | | |
| | | | cds. | | |
| 240 | gi1177476 | Homo sapiens | ILsapiens mRNA for interferon- | 569 | 93 |
| | | | induced 17kDa membrane protein. | | |
| 240 | gi177802 | Homo sapiens | Human interferon-inducible protein | 563 | 92 |
| | | | 9-27 mRNA, complete cds. | | |
| 241 | AAG72230 | Homo sapiens | Human olfactory receptor | 1615 | 100 |
| | | | polypeptide, SEQ ID NO:1911. | | |
| 241 | AAG72382 | Homo sapiens | Human OR-like polypeptide query | 1615 | 100 |
| | | | sequence, SEQ ID NO:2063. | | |
| 241 | gi15293613 | Homo sapiens | clone OR5C1 olfactory receptor | 1097 | 100 |
| | | | gene, partial cds. | | |
| 242 | gi784997 | Homo sapiens | H.sapiens mRNA for tumour | 5025 | 95 |
| | | | suppressor protein, HUGL. | | |
| 242 | gi1944491 | Homo sapiens | Human LLGL mRNA, complete cds. | 4797 | 91 |
| 242 | gi854124 | Homo sapiens | H.sapiens mRNA for human giant | 2837 | 58 |
| | | | larvae homolog. | | |
| 243 | AAB95830 | Homo sapiens | Human protein sequence SEQ ID | 219 | 72 |
| | | | NO:18850. | | |
| 243 | gi7959889 | Homo sapiens | PR02221 | 137 | 49 |
| 243 | gi2072969 | Homo sapiens | Human L1 element L1.24 p40 gene, | 133 | 48 |
| | | | complete cds. | | |
| 244 | gi15277644 | Homo sapiens | amino acid transporter (SLC7A10) | 2487 | 100 |
| | | | gene, exon 11 and complete cds. | | |
| 244 | gi9309293 | Homo sapiens | hasc-1 mRNA for asc-type amino | 2487 | 100 |
| | | | acid transporter 1, complete cds. | | |
| 244 | gi7415938 | Mus musculus | asci | 2329 | 91 |
| 245 | gi6760373 | Homo sapiens | ODZ3 (ODZ3) mRNA, partial cds. | 2323 | 100 |
| 245 | gi4760780 | Mus musculus | Ten-m3 | 2248 | 96 |
| 245 | gi6010049 | Gallus gallus | teneurin-2 protein | 878 | 62 |
| 246 | gi14286298 | Homo sapiens | clone MGC: 3593 IMAGE: 2963628, | 630 | 99 |
| | | | mRNA, complete cds. | | |
| 246 | gi4877285 | Homo sapiens | mRNA for prenylated Rab acceptor 1 | 630 | 99 |
| 246 | gi6563192 | Homo sapiens | prenylated rab acceptor 1 mRNA, | 630 | 99 |
| | | | complete cds. | | |
| 247 | gi1780976 | Human | protease | 915 | 58 |
| | | endogenous | | | |
| | | retrovirus K | | | |
| 247 | gi5802824 | Homo sapiens | endogenous retrovirus HERV-K109, | 909 | 59 |
| | | | complete sequence. | | |
| 247 | g19558703 | Homo sapiens | tandemly repeated human | 905 | 59 |
| | | | endogenous retrovirus HERV-K | | |
| | | | (HML-2.HOM), complete sequence. | | |
| 248 | gi13111941 | Homo sapiens | vesicle-associated soluble NSF | 804 | 91 |
| | | | attachment protein receptor (v- | | |
| | | | SNARE; homolog of S.cerevisiae | | |
| | | | VTI1), clone MGC: 3767 | | |
| | | | IMAGE: 2958320, mRNA, complete | | |
| | | | cds. | | |
| 248 | gi3861488 | Homo sapiens | vesicle soluble NSF attachment | 804 | 91 |
| | | | protein receptor VTI2 mRNA, | | |
| | | | complete cds. | | |
| 248 | AAY73339 | Homo sapiens | HTRM clone 2056042 protein | 804 | 91 |
| | | | sequence. | | |

[0466] TABLE 3

| | Accession | | |
|---|---|---|---|
| SEQ ID NO: | No. | Description | Results* |
| 126 | BL01130 | Sulfate transporters proteins. | BL01130A 21.63 7.407e−25 331-385 |
| | | | BL01130B 23.34 2.286e−23 429-481 |
| 126 | DM01292 | ESICULAR LUMEN DOMAIN. | DM01292I 12.82 9.400e−10 148-190 |
| | | | DM01292I 12.82 9.400e−10 591-633 |
| 130 | PR00019 | LEUCINE-RICH REPEAT | PR00019B 11.36 1.000e−10 114-128 |
| | | SIGNATURE | PR00019A 11.19 8.826e−10 117-131 |
| | | | PR00019B 11.36 4.600e−09 258-272 |
| | | | PR00019B 11.36 4.960e−09 186-200 |
| 131 | PD02327 | GLYCOPROTEIN ANTIGEN | PD02327B 19.84 5.574e−10 169-191 |
| | | PRECURSOR IMMUNOGLO. | |
| 131 | PD02365 | CHAIN FACTOR INTERLEUKIN-12 | PD02365C 7.89 4.196e−09 365-395 |
| | | BETA PRECURSOR IL-1. | |
| 132 | BL00983 | Ly-6/u-PAR domain proteins. | BL00983C 12.69 3.500e−15 142-158 |
| | | | BL00983B 8.19 1.643e−12 84-94 |
| | | | BL00983A 5.84 7.261e−10 74-83 |
| 136 | BL00290 | Immunoglobulins and major | BL00290B 13.17 6.400e−22 281-299 |
| | | histocompatibility complex proteins. | BL00290A 20.89 4.600e−16 34-57 |
| | | | BL00290A 20.89 2.080e−10 224-247 |
| 140 | BL01221 | PMP-22/EMP/MP20 family proteins. | BL01221B 13.29 6.745e−09 54-68 |
| 141 | BL00983 | Ly-6/u-PAR domain proteins. | BL00983C 12.69 4.981e−09 46-62 |
| 141 | BL00272 | Snake toxins proteins. | BL00272C 8.27 8.326e−09 50-62 |
| 143 | BL00420 | Speract receptor repeat proteins domain | BL00420B 22.67 4.627e−30 723-778 |
| | | proteins. | BL00420C 11.90 9.100e−13 809-820 |
| 143 | PR00258 | SPERACT RECEPTOR SIGNATURE | PR00258B 9.63 3.813e−15 738-750 |
| | | | PR00258E 13.33 2.047e−12 808-821 |
| | | | PR00258C 9.05 2.837e−10 753-764 |
| 143 | BL00514 | Fibrinogen beta and gamma chains C- | BL00514G 15.98 4.326e−09 542-572 |
| | | terminal domain proteins. | |
| 144 | BL01212 | ATP P2X receptors proteins. | BL01212A 34.89 1.000e−40 41-94 |
| | | | BL01212E 24.87 1.000e−40 225-280 |
| | | | BL01212G 11.86 3.700e−34 309-337 |
| | | | BL01212D 11.42 9.609e−27 182-206 |
| | | | BL01212B 19.25 8.393e−21 126-151 |
| | | | BL01212F 10.12 2.421e−15 290-301 |
| | | | BL01212C 8.40 2.500e−14 158-169 |
| 145 | PR00920 | SPUMAVIRUS ASPARTIC PROTEASE | PR00920C 13.24 7.310e−09 149-171 |
| | | (A9) SIGNATURE | |
| 146 | BL00682 | ZP domain proteins. | BL00682C 20.71 1.706e−12 439-464 |
| 146 | BL00025 | P-type ‘Trefoil’ domain proteins. | BL00025 17.17 5.645e−09 231-252 |
| 148 | BL00237 | G-protein coupled receptors proteins. | BL00237A 27.68 4.273e−14 98-138 |
| 148 | PR00854 | PROSTAGLANDIN D RECEPTOR | PR00854E 10.50 4.649e−26 236-260 |
| | | SIGNATURE | PR00854B 7.30 8.154e−21 41-59 |
| | | | PR00854G 10.66 1.783e−18 341-358 |
| | | | PR00854D 9.41 2.500e−18 185-201 |
| | | | PR00854A 15.24 9.077e−18 6-21 |
| | | | PR00854H 14.71 6.203e−17 369-390 |
| | | | PR00854C 12.92 1.643e−12 93-105 |
| | | | PR00854F 12.83 9.682e−11 321-333 |
| 148 | PR00856 | PROSTACYCLIN (PROSTANOID IP) | PR00856E 9.82 1.724e−09 178-195 |
| | | RECEPTOR SIGNATURE | |
| 149 | BL01271 | Sodium: sulfate symporter family | BL01271D 25.26 1.000e−40 480-535 |
| | | proteins. | BL01271B 12.02 6.400e−24 208-233 |
| | | | BL01271A 8.06 7.955e−23 132-152 |
| | | | BL01271C 13.62 7.429e−20 407-429 |
| 151 | PF00798 | Arenavirus glycoprotein. | PF00798I 18.55 8.811e−09 53-90 |
| 153 | BL01017 | Ergosterol biosynthesis ERG4/ERG24 | BL01017D 20.82 1.000e−40 232-278 |
| | | family proteins. | BL01017F 23.34 9.196e−35 291-344 |
| | | | BL01017C 15.91 7.324e−23 181-207 |
| | | | BL01017B 12.69 9.419e−17 166-181 |
| 154 | BL00874 | Bacterial type II secretion system protein | BL00874B 29.89 9.724e−09 414-469 |
| | | F proteins. | |
| 155 | PD01270 | RECEPTOR FC IMMUNOGLOBULIN | PD01270C 19.54 2.895e−16 43-72 |
| | | AFFIN. | |
| 155 | DM00179 | w KINASE ALPHA ADHESION T- | DM00179 13.97 8.435e−09 183-193 |
| | | CELL. | |
| 156 | BL00237 | G-protein coupled receptors proteins. | BL00237A 27.68 3.455e−14 77-117 |
| 156 | PR00237 | RHODOPSIN-LIKE GPCR | PR00237C 15.69 1.257e−10 91-114 |
| | | SUPERFAMILY SIGNATURE | PR00237E 13.03 9.100e−10 175-199 |
| 156 | PR00245 | OLFACTORY RECEPTOR | PR00245A 18.03 9.581e−18 46-68 |
| | | SIGNATURE | PR00245C 7.84 4.780e−13 214-230 |
| | | | PR00245E 12.40 6.741e−09 267-282 |
| 156 | PR00534 | MELANOCORTIN RECEPTOR | PR00534A 11.49 9.229e−09 38-51 |
| | | FAMILY SIGNATURE | |
| 158 | BL00107 | Protein kinases ATP-binding region | BL00107A 18.39 5.909e−15 409-440 |
| | | proteins. | BL00107B 13.31 4.214e−11 484-500 |
| 158 | PR00109 | TYROSINE KINASE CATALYTIC | PR00109E 14.41 4.353e−09 549-572 |
| | | DOMAIN SIGNATURE | |
| 160 | BL00290 | Immunoglobulins and major | BL00290A 20.89 4.789e−13 222-245 |
| | | histocompatibility complex proteins. | |
| 161 | PR00308 | TYPE I ANTIFREEZE PROTEIN | PR00308C 3.83 8.892e−10 4-14 |
| | | SIGNATURE | PR00308C 3.83 8.892e−10 5-15 |
| | | | PR00308C 3.83 8.013e−09 3-13 |
| 161 | PR00698 | C. ELEGANS SRG FAMILY | PR00698E 14.43 8.714e−09 111-137 |
| | | INTEGRAL MEMBRANE PROTEIN | |
| | | SIGNATURE | |
| 164 | PF00023 | Ank repeat proteins. | PF00023A 16.03 7.000e−11 69-85 |
| | | | PF00023B 14.20 2.636e−09 131-141 |
| 164 | PD00078 | REPEAT PROTEIN ANK NUCLEAR | PD00078B 13.14 6.087e−09 128-141 |
| | | ANKYR. | |
| 164 | PR00806 | VINCULIN SIGNATURE | PR00806C 11.07 8.839e−09 350-368 |
| 164 | PF00791 | Domain present in ZO-1 and Unc5-like | PF00791B 28.49 9.505e−09 135-190 |
| | | netrin receptors. | PF00791B 28.49 9.835e−09 69-124 |
| 165 | BL00237 | G-protein coupled receptors proteins. | BL00237A 27.68 5.610e−11 174-214 |
| | | | BL00237C 13.19 4.176e−10 317-344 |
| 165 | PR00237 | RHODOPSIN-LIKE GPCR | PR00237F 13.57 7.677e−11 322-347 |
| | | SUPERFAMILY SIGNATURE | PR00237E 13.03 6.100e−10 276-300 |
| | | | PR00237A 11.48 8.839e−09 103-128 |
| 166 | BL00216 | Sugar transport proteins. | BL00216B 27.64 1.831e−09 139-189 |
| 168 | BL00462 | Gamma-glutamyltranspeptidase proteins. | BL00462A 20.89 4.000e−20 108-151 |
| | | | BL00462D 23.07 7.256e−12 356-396 |
| | | | BL00462B 17.88 9.153e−12 183-220 |
| 169 | BL00115 | Eukaryotic RNA polymerase II | BL00115Z 3.12 2.125e−09 1363-1412 |
| | | heptapeptide repeat proteins. | BL00115Z 3.12 6.096e−09 1349-1398 |
| 172 | BL00272 | Snake toxins proteins. | BL00272C 8.27 9.182e−10 109-121 |
| 172 | BL00107 | Protein kinases ATP-binding region | BL00107A 18.39 3.348e−14 366-397 |
| | | proteins. | BL00107B 13.31 4.176e−09 441-457 |
| 172 | PR00653 | ACTIVIN TYPE II RECEPTOR | PR00653D 13.25 7.200e−09 385-407 |
| | | SIGNATURE | |
| 172 | PR00109 | TYROSINE KINASE CATALYTIC | PR00109E 14.41 6.727e−11 535-558 |
| | | DOMAIN SIGNATURE | PR00109D 17.04 7.609e−09 442-465 |
| 172 | BL00983 | Ly-6/u-PAR domain proteins. | BL00983C 12.69 9.135e−09 105-121 |
| 173 | BL00272 | Snake toxins proteins. | BL00272C 8.27 9.182e−10 109-121 |
| 173 | BL00107 | Protein kinases ATP-binding region | BL00107A 18.39 3.348e−14 428-459 |
| | | proteins. | BL00107B 13.31 4.176e−09 503-519 |
| 173 | PR00653 | ACTIVIN TYPE II RECEPTOR | PR00653D 13.25 7.200e−09 447-469 |
| | | SIGNATURE | |
| 173 | PR00109 | TYROSINE KINASE CATALYTIC | PR00109E 14.41 6.727e−11 597-620 |
| | | DOMAIN SIGNATURE | PR00109D 17.04 7.609e−09 504-527 |
| 173 | BL00983 | Ly-6/u-PAR domain proteins. | BL00983C 12.69 9.135e−09 105-121 |
| 174 | PR00541 | MUSCARINIC M4 RECEPTOR | PR00541C 8.06 7.726e−09 486-507 |
| | | SIGNATURE | |
| 175 | PR00541 | MUSCARINIC M4 RECEPTOR | PR00541C 8.06 7.726e−09 755-776 |
| | | SIGNATURE | |
| 176 | PD01101 | INHIBITOR HEAVY CHAIN | PD01101B 21.53 3.318e−22 343-396 |
| | | CHANNEL IN. | |
| 177 | BL00129 | Glycosyl hydrolases family 31 proteins. | BL00129A 26.21 2.400e−28 114-160 |
| | | | BL00129D 16.76 6.806e−26 364-408 |
| | | | BL00129C 15.12 5.295e−24 326-354 |
| | | | BL00129E 22.60 4.857e−23 428-464 |
| | | | BL00129B 19.19 4.436e−15 225-252 |
| | | | BL00129F 26.19 2.500e−13 544-582 |
| 179 | PR00887 | STRUCTURE-SPECIFIC | PR00887A 11.39 1.643e−22 343-360 |
| | | RECOGNITION PROTEIN | PR00887F 12.74 2.000e−22 498-516 |
| | | SIGNATURE | PR00887B 9.94 3.250e−22 365-382 |
| | | | PR00887C 13.16 4.000e−22 388-405 |
| | | | PR00887E 10.36 5.200e−22 480-499 |
| | | | PR00887H 11.84 8.313e−22 537-556 |
| | | | PR00887G 14.17 9.438e−20 521-538 |
| | | | PR00887D 15.12 8.313e−17 453-467 |
| 179 | PR00886 | HIGH MOBILITY GROUP | PR00886C 11.84 8.500e−13 696-715 |
| | | (HMG1/HMG2) PROTEIN | PR00886A 10.08 3.192e−10 710-733 |
| | | SIGNATURE | |
| 179 | PD02448 | TRANSCRIPTION PROTEIN DNA- | PD02448A 9.37 5.576e−10 686-725 |
| | | BINDIN. | |
| 179 | BL00353 | HMG1/2 proteins. | BL00353B 11.47 8.244e−24 664-714 |
| | | | BL00353A 9.60 2.549e−09 674-723 |
| 180 | BL00284 | Serpins proteins. | BL00284C 28.56 4.000e−25 472-514 |
| | | | BL00284D 16.34 5.655e−17 578-605 |
| | | | BL00284A 15.64 2.742e−15 341-365 |
| | | | BL00284E 19.15 4.818e−15 659-684 |
| | | | BL00284B 17.99 3.667e−14 445-466 |
| | | | BL00284A 15.64 2.600e−11 375-399 |
| 181 | PR00839 | V8 SERINE PROTEASE FAMILY | PR00839B 11.20 8.119e−10 357-375 |
| | | SIGNATURE | |
| 186 | BL00605 | ATP synthase c subunit proteins. | BL00605 27.67 3.172e−33 79-133 |
| 186 | PR00124 | ATP SYNTHASE C SUBUNIT | PR00124C 12.42 6.400e−18 113-139 |
| | | SIGNATURE | PR00124A 8.81 8.054e−14 75-95 |
| | | | PR00124B 14.66 6.897e−12 96-112 |
| 187 | BL00450 | Aconitase family proteins. | BL00450B 42.34 8.393e−30 386-441 |
| | | | BL00450D 21.14 2.800e−18 665-689 |
| | | | BL00450E 16.34 8.875e−13 710-725 |
| | | | BL00450B 42.34 6.400e−12 446-501 |
| | | | BL00450A 13.76 2.406e−11 351-365 |
| | | | BL00450C 11.95 6.657e−10 612-622 |
| 187 | PR00415 | ACONITASE FAMILY SIGNATURE | PR00415D 12.72 5.696e−16 390-406 |
| | | | PR00415I 13.62 4.115e−15 675-689 |
| | | | PR00415G 14.24 8.105e−15 548-563 |
| | | | PR00415C 13.34 7.828e−14 376-390 |
| | | | PR00415E 10.04 7.828e−14 452-466 |
| | | | PR00415F 11.66 7.273e−13 466-480 |
| | | | PR00415H 12.39 9.700e−13 613-625 |
| | | | PR00415A 11.15 1.621e−10 323-337 |
| | | | PR00415B 8.14 9.036e−09 347-356 |
| 193 | DM00179 | w KINASE ALPHA ADHESION T- | DM00179 13.97 1.000e−11 139-149 |
| | | CELL. | |
| 193 | BL00240 | Receptor tyrosine kinase class III | BL00240B 24.70 4.255e−09 85-109 |
| | | proteins. | |
| 195 | BL01002 | Translationally controlled tumor protein. | BL01002C 21.97 6.143e−26 79-110 |
| | | | BL01002A 13.19 1.360e−24 1-24 |
| | | | BL01002B 7.39 3.118e−14 48-62 |
| 196 | PF00997 | Kappa casein. | PF00997D 9.95 8.306e−09 513-548 |
| 198 | BL00018 | EF-hand calcium-binding domain | BL00018 7.41 1.391e−09 42-55 |
| | | proteins. | |
| 199 | BL01310 | ATP1G1/PLM/MAT8 family proteins. | BL01310 14.74 8.981e−24 99-135 |
| 201 | PR00764 | COMPLEMENT C9 SIGNATURE | PR00764B 13.56 2.250e−11 122-143 |
| 201 | PR00261 | LOW DENSITY LIPOPROTEIN (LDL) | PR00261E 11.08 6.308e−09 127-149 |
| | | RECEPTOR SIGNATURE | PR00261F 11.57 7.152e−09 127-149 |
| 204 | BL00237 | G-protein coupled receptors proteins. | BL00237A 27.68 4.273e−14 188-228 |
| 204 | PR00245 | OLFACTORY RECEPTOR | PR00245A 18.03 3.250e−19 157-179 |
| | | SIGNATURE | PR00245B 10.38 1.918e−09 275-290 |
| 204 | PR00237 | RHODOPSIN-LIKE GPCR | PR00237C 15.69 4.150e−09 202-225 |
| | | SUPERFAMILY SIGNATURE | |
| 205 | BL00237 | G-protein coupled receptors proteins. | BL00237A 27.68 2.658e−12 163-203 |
| 205 | PR00245 | OLFACTORY RECEPTOR | PR00245A 18.03 9.325e−19 132-154 |
| | | SIGNATURE | PR00245C 7.84 4.073e−15 311-327 |
| | | | PR00245B 10.38 5.500e−13 250-265 |
| | | | PR00245E 12.40 7.618e−13 364-379 |
| | | | PR00245D 10.47 4.673e−09 347-359 |
| 205 | PR00237 | RHODOPSIN-LIKE GPCR | PR00237C 15.69 6.400e−10 177-200 |
| | | SUPERFAMILY SIGNATURE | PR00237G 19.63 5.814e−09 345-372 |
| 208 | PD01719 | PRECURSOR GLYCOPROTEIN | PD01719A 12.89 7.955e−13 969-997 |
| | | SIGNAL RE. | PD01719A 12.89 8.111e−09 305-333 |
| 209 | BL00355 | HMG14 and HMG17 proteins. | BL00355 5.97 1.692e−37 18-49 |
| 209 | PR00925 | NONHISTONE CHROMOSOMAL | PR00925A 5.47 2.800e−19 18-33 |
| | | PROTEIN HMG17 FAMILY | PR00925B 3.73 3.400e−16 34-47 |
| | | SIGNATURE | PR00925D 6.56 2.200e−13 66-77 |
| | | | PR00925C 5.57 8.235e−09 47-58 |
| 213 | BL00615 | C-type lectin domain proteins. | BL00615A 16.68 4.240e−11 210-228 |
| 214 | PD02327 | GLYCOPROTEIN ANTIGEN | PD02327B 19.84 2.091e−09 191-213 |
| | | PRECURSOR IMMUNOGLO. | |
| 214 | DM00179 | w KINASE ALPHA ADHESION T- | DM00179 13.97 7.652e−09 338-348 |
| | | CELL. | |
| 216 | PD02870 | RECEPTOR INTERLEUKIN-1 | PD02870D 15.74 8.755e−09 96-131 |
| | | PRECURSOR. | |
| 222 | PR00245 | OLFACTORY RECEPTOR | PR00245A 18.03 8.364e−14 122-144 |
| | | SIGNATURE | PR00245C 7.84 9.280e−13 300-316 |
| | | | PR00245B 10.38 4.600e−11 240-255 |
| | | | PR00245E 12.40 7.623e−10 353-368 |
| 222 | BL00237 | G-protein coupled receptors proteins. | BL00237A 27.68 5.371e−13 153-193 |
| | | | BL00237D 11.23 7.750e−10 344-361 |
| 222 | PR00237 | RHODOPSIN-LIKE GPCR | PR00237G 19.63 6.063e−12 334-361 |
| | | SUPERFAMILY SIGNATURE | PR00237C 15.69 6.175e−09 167-190 |
| 223 | BL00221 | MIP family proteins. | BL00221B 10.22 1.871e−11 141-152 |
| | | | BL00221D 12.33 2.174e−11 240-255 |
| | | | BL00221E 8.47 9.710e−11 307-318 |
| | | | BL00221A 6.39 5.935e−09 92-103 |
| 223 | PR00783 | MAJOR INTRINSIC PROTEIN | PR00783B 15.98 4.130e−15 127-152 |
| | | FAMILY SIGNATURE | PR00783F 12.33 9.156e−14 308-329 |
| | | | PR00783A 12.72 7.462e−12 88-108 |
| | | | PR00783E 16.78 8.263e−10 128-151 |
| | | | PR00783C 13.54 1.340e−09 164-184 |
| | | | PR00783E 16.78 6.754e−09 226-249 |
| 225 | PD02886 | GLYCOPROTEIN PRECURSOR | PD02886C 21.92 7.907e−10 112-151 |
| | | IMMUNOGLOBULIN FOL. | |
| 226 | PR00122 | VACUOLAR ATP SYNTHASE 16 KD | PR00122C 8.20 1.000e−33 104-131 |
| | | SUBUNIT SIGNATURE | PR00122B 8.60 2.125e−28 56-81 |
| | | | PR00122D 9.97 4.375e−28 131-155 |
| | | | PR00122A 11.44 6.053e−19 30-55 |
| 226 | BL00605 | ATP synthase c subunit proteins. | BL00605 27.67 1.778e−10 94-148 |
| 226 | PR00124 | ATP SYNTHASE C SUBUNIT | PR00124C 12.42 2.161e−10 128-154 |
| | | SIGNATURE | |
| 227 | BL00665 | Dihydrodipicolinate synthetase proteins. | BL00665B 30.33 8.265e−12 52-105 |
| | | | BL00665D 14.76 1.000e−11 164-187 |
| | | | BL00665C 25.58 5.832e−11 105-156 |
| 227 | PR00146 | DIHYDRODIPICOLINATE | PR00146D 16.26 2.525e−10 163-181 |
| | | SYNTHASE SIGNATURE | |
| 228 | BL00456 | Sodium:solute symporter family proteins. | BL00456C 24.55 4.886e−28 165-220 |
| | | | BL00456A 22.59 3.127e−27 27-82 |
| | | | BL00456B 18.94 1.220e−17 103-133 |
| 228 | BL00415 | Synapsins proteins. | BL00415O 3.44 6.270e−09 514-552 |
| 228 | BL00136 | Serine proteases, subtilase family, | BL00136B 9.63 7.796e−09 773-786 |
| | | aspartic acid proteins. | |
| 230 | BL00310 | Lysosome-associated membrane | BL00310F 23.26 4.162e−09 194-249 |
| | | glycoproteins duplicated domain proteins. | |
| 232 | BL00237 | G-protein coupled receptors proteins. | BL00237A 27.68 4.115e−18 126-166 |
| | | | BL00237C 13.19 7.545e−15 263-290 |
| | | | BL00237D 11.23 8.962e−11 324-341 |
| 232 | PR00237 | RHODOPSIN-LIKE GPCR | PR00237G 19.63 7.120e−15 314-341 |
| | | SUPERFAMILY SIGNATURE | PR00237F 13.57 2.565e−14 268-293 |
| | | | PR00237C 15.69 6.667e−12 140-163 |
| | | | PR00237A 11.48 8.125e−11 63-88 |
| | | | PR00237B 13.50 1.563e−10 96-118 |
| | | | PR00237E 13.03 3.118e−09 226-250 |
| 233 | PR00049 | WILM'S TUMOR PROTEIN | PR00049D 0.00 2.068e−09 7-22 |
| | | SIGNATURE | |
| 234 | BL01159 | WW/rsp5/WWP domain proteins. | BL01159 13.85 1.310e−14 387-402 |
| 234 | PR00403 | WW DOMAIN SIGNATURE | PR00403B 12.19 6.906e−15 387-402 |
| | | | PR00403A 16.82 5.200e−11 373-387 |
| 234 | BL01179 | Phosphotyrosine interaction domain | BL01179A 12.63 8.286e−11 394-406 |
| | | proteins (PID) profile. | BL01179B 15.18 7.968e−10 667-682 |
| 236 | BL00594 | Aromatic amino acids permeases | BL00594A 16.75 3.851e−09 107-151 |
| | | proteins. | |
| 237 | PR00399 | SYNAPTOTAGMIN SIGNATURE | PR00399B 14.27 1.305e−09 242-256 |
| 237 | PR00360 | C2 DOMAIN SIGNATURE | PR00360B 13.61 6.318e−09 279-293 |
| 239 | BL00291 | Prion protein. | BL00291A 4.49 8.241e−09 21-56 |
| 241 | BL00237 | G-protein coupled receptors proteins. | BL00237A 27.68 6.447e−12 210-250 |
| 241 | PR00237 | RHODOPSIN-LIKE GPCR | PR00237G 19.63 3.512e−09 392-419 |
| | | SUPERFAMILY SIGNATURE | PR00237C 15.69 4.825e−09 224-247 |
| 241 | PR00245 | OLFACTORY RECEPTOR | PR00245A 18.03 1.500e−20 179-201 |
| | | SIGNATURE | PR00245B 10.38 3.571e−16 297-312 |
| | | | PR00245E 12.40 1.000e−12 411-426 |
| | | | PR00245D 10.47 1.000e−10 394-406 |
| | | | PR00245C 7.84 6.727e−09 358-374 |
| 242 | PR00962 | LETHAL(2) GIANT LARVAE | PR00962B 11.98 2.800e−28 310-333 |
| | | PROTEIN SIGNATURE | PR00962G 15.71 5.655e−28 609-634 |
| | | | PR00962D 10.40 1.225e−27 451-475 |
| | | | PR00962F 12.39 6.786e−23 568-588 |
| | | | PR00962H 13.32 9.710e−23 639-659 |
| | | | PR00962I 11.68 3.829e−22 708-728 |
| | | | PR00962C 8.00 4.250e−22 362-383 |
| | | | PR00962A 13.28 7.612e−22 17-36 |
| | | | PR00962E 8.81 1.628e−20 531-550 |
| 242 | PR00320 | G-PROTEIN BETA WD-40 REPEAT | PR00320A 16.74 9.122e−09 454-469 |
| | | SIGNATURE | |
| 244 | BL00218 | Amino acid permeases proteins. | BL00218D 21.49 2.038e−10 385-430 |
| | | | BL00218E 23.30 6.400e−10 466-506 |
| | | | BL00218B 21.44 5.790e−09 217-249 |
| 244 | BL00341 | Surfactant associated polypeptide SP-C | BL00341B 8.70 7.895e−09 54-88 |
| | | palmitoylation site proteins. | |
| 247 | PR00783 | MAJOR INTRINSIC PROTEIN | PR00783C 13.54 1.474e−17 31-51 |
| | | FAMILY SIGNATURE | |
| 247 | BL00221 | MIP family proteins. | BL00221B 10.22 1.643e−14 8-19 |
| 247 | PD00302 | PROTEASE POLYPROTEIN | PD00302B 9.52 1.360e−14 261-277 |
| | | HYDROLASE ASP. | PD00302A 6.33 3.323e−11 198-209 |
| 247 | PF00692 | dUTPase. | PF00692B 8.14 3.613e−11 113-124 |
| 247 | DM00892 | 3 RETROVIRAL PROTEINASE. | DM00892C 23.55 4.818e−13 292-326 |
| | | | DM00892B 9.78 1.000e−08 264-270 |

*Results show Accession No., subtype, e-value, and position of signature in the sequence.

[0467] TABLE 4

| | | | E-value | | No. of | |
|---|---|---|---|---|---|---|
| SEQ ID NO: | Pfam Model | Description | (product) | Score | Domains | Position |
| 126 | Sulfate_transp | Sulfate transporter | 4.3e−103 | 355.9 | 2 | 2-284: 441-751 |
| | | family | | | | |
| 126 | STAS | STAS domain | 4.8e−20 | 80.0 | 1 | 774-987 |
| 127 | ubiguitin | Ubiquitin family | 1.4e−09 | 39.6 | 1 | 55-126 |
| 130 | LRR | Leucine Rich Repeat | 9.6e−40 | 145.5 | 10 | 44-67: 68-91: |
| | | | | | | 92-115: 116-139: |
| | | | | | | 140-163: 164-187: |
| | | | | | | 188-211: 212-235: |
| | | | | | | 236-259: 260-283 |
| 131 | ig | Immunoglobulin | 1.2e-30 | 103.8 | 5 | 62-129: 163-229: |
| | | domain | | | | 264-316: 349-400: |
| | | | | | | 433-501 |
| 132 | UPAR_LY6 | u-PAR/Ly-6 domain | 9.1e−59 | 208.7 | 1 | 63-190 |
| 136 | MHC_I | Class I | 3.2e−147 | 502.5 | 1 | 25-203 |
| | | Histocompatibility | | | | |
| | | antigen, domains | | | | |
| 136 | ig | Immunoglobulin | 0.057 | 11.4 | 1 | 220-285 |
| | | domain | | | | |
| 139 | ig | Immunoglobulin | 2.3e−09 | 35.2 | 1 | 38-110 |
| | | domain | | | | |
| 140 | PMP22_Claud | PMP- | 0.0019 | −4.7 | 1 | 4-194 |
| | in | 22/EMP/MP20/Claud | | | | |
| | | in family | | | | |
| 143 | SRCR | Scavenger receptor | 6.2e−25 | 96.3 | 1 | 722-820 |
| | | cysteine-rich domain | | | | |
| 144 | P2X_receptor | ATP P2X receptor | 9.3e−302 | 1015.9 | 1 | 13-388 |
| 146 | zona_pellucida | Zona pellucida-like | 1.1e−80 | 281.5 | 1 | 268-538 |
| | | domain | | | | |
| 146 | trefoil | Trefoil (P-type) | 0.02 | 9.1 | 1 | +111 224-262 |
| | | domain | | | | |
| 147 | Aa_trans | Transmembrane | 9.4e-09 | 42.5 | 1 | 30-389 |
| | | amino acid | | | | |
| | | transporter protein | | | | |
| 148 | 7tm_1 | 7 transmembrane | 2.1e−13 | 44.8 | 1 | 33-280 |
| | | receptor (rhodopsin | | | | |
| | | family) | | | | |
| 149 | Na_sulph_{—} | Sodium: sulfate | 1.2e−143 | 490.7 | 1 | 16-554 |
| | symp | symporter | | | | |
| | | transmembrane | | | | |
| 153 | ERG4_ERG24 | Ergosterol | 1.1e−103 | 357.8 | 1 | 7-350 |
| | | biosynthesis | | | | |
| | | ERG4/ERG24 family | | | | |
| 155 | ig | Immunoglobulin | 4.7e−16 | 56.8 | 3 | 42-95: 135-192: |
| | | domain | | | | 231-288 |
| 156 | 7tm_1 | 7 transmembrane | 2.3e−33 | 108.1 | 1 | 28-266 |
| | | receptor (rhodopsin | | | | |
| | | family) | | | | |
| 158 | pkinase | Protein kinase | 4.9e−68 | 239.4 | 1 | 298-578 |
| | | domain | | | | |
| 158 | Activin_recp | Activin types I and II | 1.6e−27 | 104.8 | 1 | 20-107 |
| | | receptor domain | | | | |
| 159 | PMP22_Claud | PMP- | 0.00018 | 13.2 | 1 | 3-177 |
| | in | 22/EMP/MP20/Claud | | | | |
| | | in family | | | | |
| 160 | MHC_I | Class I | 4.4e−14 | 55.1 | 1 | 24-196 |
| | | Histocompatibility | | | | |
| | | antigen, domains | | | | |
| 160 | ig | Immunoglobulin | 2.8e−07 | 28.5 | 1 | 218-284 |
| | | domain | | | | |
| 162 | sugar_tr | Sugar (and other) | 0.028 | −126.7 | 1 | 48-528 |
| | | transporter | | | | |
| 163 | sugar_tr | Sugar (and other) | 0.028 | −126.7 | 1 | 136-616 |
| | | transporter | | | | |
| 164 | ank | Ankrepeat | 1.7e−45 | 164.6 | 6 | 31-63: 64-96: |
| | | | | | | 97-129: 130-162: |
| | | | | | | 163-195: 196-228 |
| 165 | 7tm_1 | 7 transmembrane | 5.6e−12 | 40.2 | 1 | 178-349 |
| | | receptor (rhodopsin | | | | |
| | | family) | | | | |
| 166 | sugar_tr | Sugar (and other) | 0.0032 | −100.1 | 1 | 46-470 |
| | | transporter | | | | |
| 168 | G_glu_{—} | Gamma- | 2.8e−05 | −144.9 | 1 | 122-500 |
| | transpept | glutamyltranspeptidase | | | | |
| 169 | TPR | TPR Domain | 2.3e−19 | 77.8 | 5 | 28-61: 68-101: |
| | | | | | | 108-141: 148-181: |
| | | | | | | 188-221 |
| 170 | ACAT | Sterol O- | 1.9e−32 | 121.3 | 1 | 300-406 |
| | | acyltransferase | | | | |
| 171 | WD40 | WD domain,G-beta | 2.3e−16 | 67.8 | 7 | 1015-1050: 1059- |
| | | repeat | | | | 1097: 1115-1151: |
| | | | | | | 1158-1194: 1203- |
| | | | | | | 1240: 1246-1281: |
| | | | | | | 1293-1329 |
| 172 | pkinase | Protein kinase | 4.9e−57 | 202.9 | 2 | 248-492: 537-564 |
| | | domain | | | | |
| 172 | Activin_recp | Activin types I and II | 3.1e−36 | 133.8 | 1 | 26-127 |
| | | receptor domain | | | | |
| 173 | pkinase | Protein kinase | 4.9e−57 | 202.9 | 2 | 310-554: 599-626 |
| | | domain | | | | |
| 173 | Activin_recp | Activin types I and II | 3.1e−36 | 133.8 | 1 | 26-127 |
| | | receptor domain | | | | |
| 175 | C2 | C2 domain | 1.7e−06 | 35.0 | 1 | 233-316 |
| 176 | Cache | Cache domain | 1.5e−25 | 96.2 | 2 | 557-650: 960-985 |
| 177 | Glyco_hydro_{—} | Glycosyl hydrolases | 4.9e−268 | 903.8 | 2 | 1-92: 114-636 |
| | 31 | family 31 | | | | |
| 179 | HMG_box | HMG (high mobility | 3.8e−32 | 120.2 | 1 | 681-749 |
| | | group) box | | | | |
| 180 | serpin | Serpin (serine | 3.1e−195 | 662.0 | 1 | 315-683 |
| | | protease inhibitor) | | | | |
| 181 | trypsin | Trypsin | 0.0044 | 12.4 | 1 | 406-526 |
| 183 | Aa_trans | Transmembrane | 0.0042 | −25.4 | 1 | 141-551 |
| | | amino acid | | | | |
| | | transporter protein | | | | |
| 186 | ATP-synt_C | ATP synthase subunit C | 3.3e−18 | 73.9 | 1 | 72-140 |
| 187 | aconitase | Aconitase family | 1.4e−198 | 651.7 | 2 | 162-241: 321-744 |
| | | (aconitate hydratase) | | | | |
| 187 | Aconitase_C | Aconitase C-terminal | 8.9e−72 | 251.9 | 1 | 872-1043 |
| | | domain | | | | |
| 192 | PAP2 | PAP2 superfamily | 6.3e−15 | 63.0 | 1 | 89-236 |
| 193 | ig | Immunoglobulin | 1.4e−20 | 71.3 | 2 | 80-148: 183-251 |
| | | domain | | | | |
| 195 | TCTP | Translationally | 3.5e−93 | 323.0 | 1 | 1-166 |
| | | controlled tumor | | | | |
| | | protein | | | | |
| 198 | efhand | EF hand | 1.2e−13 | 58.8 | 3 | 33-61: 102-130: |
| | | | | | | 138-166 |
| 199 | ATP1G1_{—} | ATP1G1/PLMIMAT | 1.8e−13 | 58.2 | 1 | 92-146 |
| | PLM_MAT8 | 8 family | | | | |
| 201 | ldl_recepta | Low-density | 0.00073 | 26.3 | 1 | 115-153 |
| | | lipoprotein receptor | | | | |
| | | domain | | | | |
| 201 | CUB | CUB domain | 0.002 | −3.5 | 1 | 9-109 |
| 204 | 7tm_1 | 7 transmembrane | 3.9e−21 | 69.3 | 1 | 139-317 |
| | | receptor (rhodopsin | | | | |
| | | family) | | | | |
| 205 | 7tm_1 | 7 transmembrane | 1.4e−24 | 80.3 | 3 | 2-28: 114-275: |
| | | receptor (rhodopsin | | | | 348-363 |
| | | family) | | | | |
| 208 | tsp_1 | Thrombospondin | 4.5e−38 | 139.9 | 10 | 149-198: 306-364: |
| | | type 1 domain | | | | 571-626: 631-696: |
| | | | | | | 707-761: 841-889: |
| | | | | | | 970-1021: 1099-1148: |
| | | | | | | 1219-1269: 1342-1398 |
| 209 | HMG14_17 | HMG14 and HMG17 | 1.3e−34 | 128.4 | 1 | 2-86 |
| 214 | ig | Immunoglobulin | 4.7e−20 | 69.7 | 3 | 84-153: 185-255: |
| | | domain | | | | 292-347 |
| 216 | ig | Immunoglobulin | 1.6e−10 | 38.9 | 1 | 42-112 |
| | | domain | | | | |
| 220 | C2 | C2 domain | 5.7e−19 | 76.5 | 2 | 167-257: 667-750 |
| 222 | 7tm_1 | 7 transmembrane | 6.9e−29 | 93.9 | 1 | 104-352 |
| | | receptor (rhodopsin | | | | |
| | | family) | | | | |
| 223 | MIP | Major intrinsic | 3.9e-40 | 125.5 | 3 | 80-189: 197-262: |
| | | protein | | | | 308-325 |
| 225 | sugar_tr | Sugar (and other) | 0.024 | −124.9 | 1 | 23-504 |
| | | transporter | | | | |
| 226 | ATP-synt_C | ATP synthase subunit C | 3.3e−35 | 130.4 | 2 | 14-79: 90-155 |
| 227 | DHDPS | Dihydrodipicolinate | 4.4e−32 | 120.0 | 1 | 34-325 |
| | | synthetase family | | | | |
| 228 | SSF | Sodium: solute | 1.5e−48 | 174.7 | 2 | 50-461: 569-953 |
| | | symporter family | | | | |
| 232 | 7tm_1 | 7 transmembrane | 2.2e−50 | 162.2 | 1 | 78-332 |
| | | receptor (rhodopsin | | | | |
| | | family) | | | | |
| 234 | PID | Phosphotyrosine | 1.9e−94 | 327.2 | 2 | 488-627: 661-782 |
| | | interaction domain | | | | |
| | | (PTB/PID) | | | | |
| 234 | WW | WW domain | 2.5e−08 | 41.1 | 1 | 373-401 |
| 237 | C2 | C2 domain | 2.1e−30 | 114.4 | 2 | 87-165: 240-320 |
| 241 | 7tm_1 | 7 transmembrane | 9.6e−31 | 99.8 | 1 | 161-410 |
| | | receptor (rhodopsin | | | | |
| | | family) | | | | |
| 242 | WD40 | WD domain, G-beta | 0.013 | 22.1 | 4 | 26-62: 71-109: |
| | | repeat | | | | 236-271: 430-467 |
| 244 | aa_perrneases | Amino acid permease | 5.6e−06 | −179.9 | 1 | 193-613 |
| 247 | dUTPase | dUTPase | 5.1e−29 | 109.8 | 1 | 46-167 |
| 247 | MIP | Major intrinsic | 3.8e−28 | 88.8 | 1 | 2-56 |
| | | protein | | | | |
| 247 | rvp | Retroviral aspartyl | 2.1e−22 | 85.1 | 1 | 179-280 |
| | | protease | | | | |
| 247 | G-patch | G-patch domain | 0.00095 | 25.9 | 1 | 285-329 |

[0468] TABLE 5

| | | | | | | | | | | |
|---|---|---|---|---|---|---|---|---|---|---|
| SEQ ID NO: | PDB ID | Chain ID | Start AA | End AA | PSI-BLAST | Verify Score | PMF Score | SeqFold Score | Compound | PDB Annotation |

| | | | | | | | | | | | |
|---|---|---|---|---|---|---|---|---|---|---|---|
| 130 | 1a4y | A | 29 | 355 | 9.8e−16 | 0.19 | 0.12 | | RIBONUCLEASE INHIBITOR; | COMPLEX (INHIBITOR/NUCLEASE) | |
| | | | | | | | | | CHAIN: A, D; ANGIOGENIN; | COMPLEX (INHIBITOR/NUCLEASE), | |
| | | | | | | | | | CHAIN: B, E; | COMPLEX (RI-ANG), HYDROLASE 2 | |
| | | | | | | | | | | MOLECULAR RECOGNITION, | |
| | | | | | | | | | | EPITOPE MAPPING, LEUCINE-RICH 3 | |
| | | | | | | | | | | REPEATS | |
| 130 | 1a4y | A | 42 | 493 | 8.4e−11 | | | 71.45 | RIBONUCLEASE INHIBITOR; | COMPLEX (INHIBITOR/NUCLEASE) | |
| | | | | | | | | | CHAIN: A, D; ANGIOGENIN; | COMPLEX (INHIBITOR/NUCLEASE), | |
| | | | | | | | | | CHAIN: B, E; | COMPLEX (RI-ANG), HYDROLASE 2 | |
| | | | | | | | | | MOLECULAR RECOGNITION, | | |
| | | | | | | | | | EPITOPE MAPPING, LEUCINE-RICH 3 | | |
| | | | | | | | | | REPEATS | | |
| 130 | 1a4y | A | 46 | 293 | 1.7e−34 | 0.24 | 0.95 | | RIBONUCLEASE INHIBITOR; | COMPLEX (INHIBITOR/NUCLEASE) | |
| | | | | | | | | | CHAIN: A, D; ANGIOGENIN; | COMPLEX (INHIBITOR/NUCLEASE), | |
| | | | | | | | | | CHAIN: B, E; | COMPLEX (RI-ANG), HYDROLASE 2 | |
| | | | | | | | | | MOLECULAR RECOGNITION, | | |
| | | | | | | | | | EPITOPE MAPPING, LEUCINE-RICH 3 | | |
| | | | | | | | | | REPEATS | | |
| 130 | 1a9n | A | 122 | 276 | 5.1e−27 | 0.42 | 0.54 | | U2 RNA HAIRPIN IV; CHAIN: Q, | COMPLEX (NUCLEAR PROTEIN/RNA) | |
| | | | | | | | | | R; U2 A′; CHAIN: A, C; U2 B″; | COMPLEX (NUCLEAR PROTEIN/RNA), | |
| | | | | | | | | | CHAIN: B, D; | RNA, SNRNP, RIBONUCLEOPROTEIN | |
| 130 | 1a9n | A | 170 | 293 | 5.1e−23 | 0.36 | 0.31 | | U2 RNA HAIRPIN IV; CHAIN: Q, | COMPLEX (NUCLEAR PROTEIN/RNA) | |
| | | | | | | | | | R; U2 A′; CHAIN: A, C; U2 B″; | COMPLEX (NUCLEAR PROTEIN/RNA), | |
| | | | | | | | | | CHAIN: B, D; | RNA, SNRNP, RIBONUCLEOPROTEIN | |
| 130 | 1a9n | A | 193 | 304 | 1.4e−18 | 0.20 | 0.36 | | U2 RNA HAIRPIN IV; CHAIN: Q, | COMPLEX (NUCLEAR PROTEIN/RNA) | |
| | | | | | | | | | R; U2 A′; CHAIN: A, C; U2 B″; | COMPLEX (NUCLEAR PROTEIN/RNA), | |
| | | | | | | | | | CHAIN: B, D; | RNA, SNRNP, RIBONUCLEOPROTEIN | |
| 130 | 1a9n | A | 214 | 311 | 2.8e−06 | 0.45 | 0.11 | | U2 RNA HAIRPIN IV; CHAIN: Q, | COMPLEX (NUCLEAR PROTEIN/RNA) | |
| | | | | | | | | | R; U2 A′; CHAIN: A, C; U2 B″; | COMPLEX (NUCLEAR PROTEIN/RNA), | |
| | | | | | | | | | CHAIN: B, D; | RNA, SNRNP, RIBONUCLEOPROTEIN | |
| 130 | 1a9n | A | 50 | 197 | 3.4e−26 | 0.25 | 0.84 | | U2 RNA HAIRPIN IV; CHAIN: Q, | COMPLEX (NUCLEAR PROTEIN/RNA) | |
| | | | | | | | | | R; U2 A′; CHAIN: A, C; U2 B″; | COMPLEX (NUCLEAR PROTEIN/RNA), | |
| | | | | | | | | | CHAIN: B, D; | RNA, SNRNP, RIBONUCLEOPROTEIN | |
| 130 | 1a9n | A | 74 | 213 | 1.2e−27 | 0.34 | 0.68 | | U2 RNA HAIRPIN IV; CHAIN: Q, | COMPLEX (NUCLEAR PROTEIN/RNA) | |
| | | | | | | | | | R; U2 A′; CHAIN: A, C; U2 B″; | COMPLEX (NUCLEAR PROTEIN/RNA), | |
| | | | | | | | | | CHAIN: B, D; | RNA, SNRNP, RIBONUCLEOPROTEIN | |
| 130 | 1a9n | C | 122 | 276 | 1e−26 | 0.41 | 0.52 | | U2 RNA HAIRPIN IV; CHAIN: Q, | COMPLEX (NUCLEAR PROTEIN/RNA) | |
| | | | | | | | | | R; U2 A′; CHAIN: A, C; U2 B″; | COMPLEX (NUCLEAR PROTEIN/RNA), | |
| | | | | | | | | | CHAIN: B, D; | RNA, SNRNP, RIBONUCLEOPROTEIN | |
| 130 | 1a9n | C | 170 | 293 | 1.7e−22 | 0.17 | 0.28 | | U2 RNA HAIRPIN IV; CHAIN: Q, | COMPLEX (NUCLEAR PROTEIN/RNA) | |
| | | | | | | | | | R; U2 A′; CHAIN: A, C; U2 B″; | COMPLEX (NUCLEAR PROTEIN/RNA), | |
| | | | | | | | | | CHAIN: B, D; | RNA, SNRNP, RIBONUCLEOPROTEIN | |
| 130 | 1a9n | C | 193 | 304 | 1e−18 | 0.20 | 0.33 | | U2 RNA HAIRPIN IV; CHAIN: Q, | COMPLEX (NUCLEAR PROTEIN/RNA) | |
| | | | | | | | | | R; U2 A′; CHAIN: A, C; U2 B″; | COMPLEX (NUCLEAR PROTEIN/RNA), | |
| | | | | | | | | | CHAIN: B, D; | RNA, SNRNP, RIBONUCLEOPROTEIN | |
| 130 | 1a9n | C | 214 | 311 | 2.8e−06 | 0.45 | −0.02 | | U2 RNA HAIRPIN IV; CHAIN: Q, | COMPLEX (NUCLEAR PROTETN/RNA) | |
| | | | | | | | | | R; U2 A′; CHAIN: A, C; U2 B″; | COMPLEX (NUCLEAR PROTEIN/RNA), | |
| | | | | | | | | | CHAIN: B, D; | RNA, SNRNP, RIBONUCLEOPROTEIN | |
| 130 | 1a9n | C | 48 | 200 | 6.8e−27 | 0.11 | 0.59 | | U2 RNA HAIRPIN IV; CHAIN: Q, | COMPLEX (NUCLEAR PROTEIN/RNA) | |
| | | | | | | | | | R; U2 A′; CHAIN: A, C; U2 B″; | COMPLEX (NUCLEAR PROTEIN/RNA), | |
| | | | | | | | | | CHAIN: B, D; | RNA, SNRNP, RIBONUCLEOPROTEIN | |
| 130 | 1a9n | C | 74 | 232 | 5.1e−28 | 0.15 | −0.05 | | U2 RNA HAIRPIN IV; CHAIN: Q, | COMPLEX (NUCLEAR PROTEIN/RNA) | |
| | | | | | | | | | R; U2 A′; CHAIN: A, C; U2 B″; | COMPLEX (NUCLEAR PROTEIN/RNA), | |
| | | | | | | | | | CHAIN: B, D; | RNA, SNRNP, RIBONUCLEOPROTEIN | |
| 130 | 1a9n | C | 98 | 251 | 1.7e−25 | 0.59 | 0.48 | | U2 RNA HAIRPIN IV; CHAIN: Q, | COMPLEX (NUCLEAR PROTEIN/RNA) | |
| | | | | | | | | | R; U2 A″; CHAIN: A, C; U2 B″; | COMPLEX (NUCLEAR PROTEIN/RNA), | |
| | | | | | | | | | CHAIN: B, D; | RNA, SNRNP, RIBONUCLEOPROTEIN | |
| 130 | 1d0b | A | 138 | 311 | 5.6e−21 | 0.42 | 0.88 | | INTERNALIN B; CHAIN: A; | CELL ADHESION LEUCINE RICH | |
| | | | | | | | | | | REPEAT, CALCIUM BINDING, CELL | |
| | | | | | | | | | | ADHESION | |
| 130 | 1d0b | A | 24 | 122 | 8.4e−13 | 0.21 | 1.00 | | INTERNALIN B; CHAIN: A; | CELL ADHESION LEUCINE RICH | |
| | | | | | | | | | | REPEAT, CALCIUM BINDING, CELL | |
| | | | | | | | | | | ADHESION | |
| 130 | 1d0b | A | 43 | 178 | 1.4e−24 | 0.71 | 1.00 | | INTERNALIN B; CHAIN: A; | CELL ADHESION LEUCINE RICH | |
| | | | | | | | | | | REPEAT, CALCIUM BINDING, CELL | |
| | | | | | | | | | | ADHESION | |
| 130 | 1d0b | A | 53 | 270 | 1.7e−33 | 0.36 | 1.00 | | INTERNALIN B; CHAIN: A; | CELL ADHESION LEUCINE RICH | |
| | | | | | | | | | | REPEAT, CALCIUM BINDING, CELL | |
| | | | | | | | | | | ADHESION | |
| 130 | 1d0b | A | 75 | 297 | 1.7e−33 | | | 65.89 | INTERNALIN B; CHAIN: A; | CELL ADHESION LEUCINE RICH | |
| | | | | | | | | | | REPEAT, CALCIUM BINDING, CELL | |
| | | | | | | | | | | ADHESION | |
| 130 | 1d0b | A | 87 | 266 | 1.1e−24 | 0.29 | 1.00 | | INTERNALIN B; CHAIN: A; | CELL ADHESION LEUCINE RICH | |
| | | | | | | | | | | REPEAT, CALCIUM BINDING, CELL | |
| | | | | | | | | | | ADHESION | |
| 130 | 1d0b | A | 95 | 304 | 1.2e−27 | 0.39 | 0.99 | | INTERNALIN B; CHAIN: A; | CELL ADHESION LEUCINE RICH | |
| | | | | | | | | | | REPEAT, CALCIUM BINDING, CELL | |
| | | | | | | | | | | ADHESION | |
| 130 | 1dce | A | 214 | 332 | 1.4e−09 | 0.42 | 0.83 | | RAB | TRANSFERASE CRYSTAL | |
| | | | | | | | | | GERANYLGERANYLTRANSFER | STRUCTURE, RAB | |
| | | | | | | | | | ASE ALPHA SUBUNIT; CHAIN: | GERANYLGERANYLTRANSFEPASE | |
| | | | | | | | | | A, C; RAB | 2.0 A 2 RESOLUTION, N- | |
| | | | | | | | | | GERANYLGERANYLTRANSFER | FORMYLMETHIONINE, ALPHA | |
| | | | | | | | | | ASE BETA SUBUNIT; CHAIN: B, D | SUBUNIT, BETA SUBUNIT | |
| 130 | 1ds9 | A | 48 | 192 | 1.7e−18 | −0.61 | 0.06 | | OUTER ARM DYNEIN; CHAIN: | CONTRACTILE PROTEIN LEUCINE- | |
| | | | | | | | | | A; | RICH REPEAT, BETA-BETA-ALPHA | |
| | | | | | | | | | | CYLINDER, DYNEIN, 2 | |
| | | | | | | | | | | CHLAMYDOMONAS, FLAGELIA | |
| 130 | 1ds9 | A | 55 | 175 | 2.8e−13 | −0.16 | 0.00 | | OUTER ARM DYNEIN; CHAIN: | CONTRACTILE PROTEIN LEUCINE- | |
| | | | | | | | | | A; | RICH REPEAT, BETA-BETA-ALPHA | |
| | | | | | | | | | | CYLINDER, DYNEIN, 2 | |
| | | | | | | | | | | CULAMYDOMONAS, FLAGELLA | |
| 130 | 1ds9 | A | 93 | 282 | 1e−23 | −0.28 | 0.04 | | OUTER ARM DYNEIN; CHAIN: | CONTRACTILE PROTEIN LEUCINE- | |
| | | | | | | | | | A; | RICH REPEAT, BETA-BETA-ALPHA | |
| | | | | | | | | | | CYLINDER, DYNEIN, 2 | |
| | | | | | | | | | | CHLAMYDOMONAS, FLAGELLA | |
| 130 | 1fo1 | A | 233 | 295 | 9.8e−07 | −0.14 | 0.04 | | NUCLEAR RNA EXPORT | RNA BINDING PROTEIN TAP (NFX1); | |
| | | | | | | | | | FACTOR 1; CHAIN: A, B; | RIBONUCLEOPROTEIN (RNP, RBD OR | |
| | | | | | | | | | | RRM) AND LEUCINE-RICH-REPEAT 2 | |
| | | | | | | | | | | (LRR) | |
| 130 | 1fo1 | A | 257 | 332 | 5.6e−05 | 0.06 | 0.48 | | NUCLEAR RNA EXPORT | RNA BINDING PROTEIN TAP (NEX1); | |
| | | | | | | | | | FACTOR I; CHAIN: A, B; | RIBONUCLEOPROTEIN (RNP,RBD OR | |
| | | | | | | | | | | RRM) AND LEUCINE-RICH-REPEAT 2 | |
| | | | | | | | | | | (LRR) | |
| 130 | 1fo1 | B | 233 | 295 | 9.8e−07 | 0.04 | 0.07 | | NUCLEAR RNA EXPORT | RNA BINDING PROTEIN TAP (NFX1); | |
| | | | | | | | | | FACTOR 1; CHAIN: A, B; | RIBONUCLEOPROTEIN (RNP,RBD OR | |
| | | | | | | | | | | RRM) AND LEUCINE-RICH-REPEAT 2 | |
| | | | | | | | | | | (LRR) | |
| 130 | 1fo1 | B | 257 | 332 | 5.6e−05 | 0.04 | −0.02 | | NUCLEAR RNA EXPORT | RNA BINDING PROTEIN TAP (NFX1); | |
| | | | | | | | | | FACTOR 1; CHAIN: A, B; | RIBONUCLEOPROTEIN (RNP,RBD OR | |
| | | | | | | | | | | RRM) AND LEUCINE-RICH-REPEAT 2 | |
| | | | | | | | | | | (LRR) | |
| 130 | 1fqv | A | 87 | 293 | 8.5e−17 | 0.08 | −0.06 | | SKP2; CHAIN: A, C, E, G, I, K, M, | LIGASE CYCLIN A/CDK2- | |
| | | | | | | | | | O; SKP1; CHAIN: B, D, F, H, J, L, | ASSOCIATED PROTEIN P45; CYCLIN | |
| | | | | | | | | | N, P; | A/CDK2-ASSOCIATED PROTEIN P19; | |
| | | | | | | | | | | SKP1, SKP2, F-BOX, LRR, LEUCINE | |
| | | | | | | | | | | RICH REPEAT, SCF, UBIQUITIN, 2 E3, | |
| | | | | | | | | | | UBIQUIITIN PROTEIN LIGASE | |
| 130 | 1fs2 | A | 11 | 262 | 1.2e−13 | −0.20 | 0.06 | | SKP2; CHAIN: A, C; SKP1; | LIGASE CYCLIN A/CDK2- | |
| | | | | | | | | | CHAIN: B, D; | ASSOCIATED P45; CYCLIN A/CDK2- | |
| | | | | | | | | | | ASSOCIATED P19; SKP1, SKP2, F-BOX, | |
| | | | | | | | | | | LRRS, LEUCINE-RICH REPEATS, SCF, | |
| | | | | | | | | | | 2 UBIQUITIN, E3, UBIQUITIN PROTEIN | |
| | | | | | | | | | | LIGASE | |
| 130 | 1fs2 | A | 92 | 285 | 8.5e−16 | 0.35 | 0.36 | | SKP2; CHAIN: A, C; SKP1; | LIGASE CYCLIN A/CDK2- | |
| | | | | | | | | | CHAIN: B, D; | ASSOCIATED P45; CYCLIN A/CDK2- | |
| | | | | | | | | | | ASSOCIATED P19; SKP1, SKP2, F-BOX, | |
| | | | | | | | | | | LRRS, LEUCINE-RICH REPEATS, SCF, | |
| | | | | | | | | | | 2 UBIQUITIN, E3, UBIQUITIN PROTEIN | |
| | | | | | | | | | | LIGASE | |
| 130 | 1ft8 | A | 233 | 295 | 9.8e−07 | −0.19 | 0.09 | | TIP ASSOCIATING PROTEIN; | RNA BINDING PROTEIN TAP; | |
| | | | | | | | | | CHAIN: A, B, C, D, E; | RIBONUCLEOPROTEIN (RNP, RRM, | |
| | | | | | | | | | | RBD) AND LEUCINE-RICH-REPEAT 2 | |
| | | | | | | | | | | (LRR) DOMAINS | |
| 130 | 1ft8 | A | 257 | 332 | 5.6e−05 | 0.02 | 0.17 | | TIP ASSOCIATING PROTEIN; | RNA BINDING PROTEIN TAP; | |
| | | | | | | | | | CHAIN: A, B, C, D, E; | RIBONUCLEOPROTEIN (RNP, RRM, | |
| | | | | | | | | | | RED) AND LEUCINE-RICH-REPEAT 2 | |
| | | | | | | | | | | (LRR) DOMAINS | |
| 130 | 1yrg | A | 48 | 271 | 6.8e−29 | −0.07 | 0.06 | | GTPASE-ACTIVATING PROTEIN | TRANSCRIPTION RNA1P; RANGAP; | |
| | | | | | | | | | RNA1_SCHPO; CHAIN: A, B; | GTPASE-ACTIVATING PROTEIN FOR | |
| | | | | | | | | | | SPI1, GTPASE-ACTIVATING PROTEIN, | |
| | | | | | | | | | | GAP, RNA1P, RANGAP, LRR, | |
| | | | | | | | | | | LEUCINE-2 RICH REPEAT PROTEIN, | |
| | | | | | | | | | | TWINNING, HEMIHEDRAL | |
| | | | | | | | | | | TWINNING, 3 MEROHEDRAL | |
| | | | | | | | | | | TWINNING, MEROHEDRY | |
| 130 | 2bnh | | 40 | 293 | 3.4e−35 | 0.19 | 0.99 | | RIBONUCLEASE INHIBITOR; | ACETYLATION RNASE INHIBITOR, | |
| | | | | | | | | | CHAIN: NULL; | RIBONUCLEASE/ANGIOGENIN | |
| | | | | | | | | | | INHIBITOR ACETYLATION, LEUCINE- | |
| | | | | | | | | | | RICH REPEATS | |
| 130 | 2bnh | | 66 | 443 | 4.2e−21 | −0.17 | 0.00 | | RIBONUCLEASE INHIBITOR; | ACETYLATION RNASE INHIBITOR, | |
| | | | | | | | | | CHAIN: NULL; | RIBONUCLEASE/ANGIOGENIN | |
| | | | | | | | | | | INHIBITOR ACETYLATION, LEUCINE- | |
| | | | | | | | | | | RICH REPEATS | |
| 131 | 12e8 | H | 336 | 518 | 5.6e−51 | —0.05 | 0.10 | | 2E8 (IGG1 = KAPPA =) | IMMUNOGLOBULIN | |
| | | | | | | | | | ANTIBODY; CHAIN: L, H, M, P; | IMMUNOGLOBULIN | |
| 131 | 1a31 | H | 336 | 515 | 4.2e−50 | 0.02 | 0.19 | | IMMUNOGLOBULINFAB 13G5; | IMMUNOGLOBULIN DIELS-ALDER, | |
| | | | | | | | | | CHAIN: L, H; | DISFAVORED REACTION, | |
| | | | | | | | | | | CATALYTIC ANTIBODY, 2 | |
| | | | | | | | | | | IMMUNOGLOBULIN | |
| 131 | 1adq | L | 51 | 240 | 8.4e−32 | −0.11 | 0.18 | | IGG4 REA; CHAIN: A; RF-AN | COMPLEX | |
| | | | | | | | | | IGM/LAMBDA; CHAIN: H, L; | (IMMUNOGLOBULIN/AUTOANTIGEN) | |
| | | | | | | | | | | COMPLEX | |
| | | | | | | | | | | (IMMUNOGLOBULIN/AUTOANTIGEN), | |
| | | | | | | | | | | RHEUMATOID FACTOR 2 AUTO- | |
| | | | | | | | | | | ANTIBODY COMPLEX | |
| 131 | 1afv | H | 336 | 517 | 5.6e−51 | 0.17 | 0.10 | | HUMAN IMMUNODEFICIENCY | COMPLEX (VIRAL | |
| | | | | | | | | | VIRUS TYPE 1 CAPSID CHAIN: | CAPSID/IMMUNOGLOBULIN) HIV-1 | |
| | | | | | | | | | A, B; ANTIBODY FAB25.3 | CA, HIV CA, HIV P24, P24; FAB, FAB | |
| | | | | | | | | | FRAGMENT; CHAIN: H, K, L, M; | LIGHT CHAIN, FAB HEAVY CHAIN | |
| | | | | | | | | | | COMPLEX (VIRAL | |
| | | | | | | | | | | CAPSID/IMMUNOGLOBULIN), HIV, | |
| | | | | | | | | | | CAPSID PROTEIN, 2 P24 | |
| 131 | 1bih | A | 149 | 506 | 2.8e−27 | 0.13 | 0.87 | | HEMOLIN; CHAIN: A, B; | INSECT IMMUNITY INSECT | |
| | | | | | | | | | | IMMUNITY, LPS-BINDING, | |
| | | | | | | | | | | HOMOPHILIC ADHESION | |
| 131 | 1bih | A | 150 | 515 | 8.5e−45 | 0.37 | 0.80 | | HEMOLIN; CHAIN: A, B; | INSECT IMMUNITY INSECT | |
| | | | | | | | | | | IMMUNITY, LPS-BINDING, | |
| | | | | | | | | | | HOMOPHILIC ADHESION | |
| 131 | 1bih | A | 46 | 417 | 3.4e−48 | | | 130.68 | HEMOLIN; CHAIN: A, B; | INSECT IMMUNITY INSECT | |
| | | | | | | | | | | IMMUNITY, LPS-BINDING, | |
| | | | | | | | | | | HOMOPHILIC ADHESION | |
| 131 | 1bih | A | 50 | 417 | 3.4e−48 | 0.15 | 1.00 | | HEMOLIN; CHAIN: A, B; | INSECT IMMUNITY INSECT | |
| | | | | | | | | | | IMMUNITY, LPS-BINDING, | |
| | | | | | | | | | | HOMOPHILIC ADHESION | |
| 131 | 1bm3 | H | 336 | 519 | 1.3e−50 | 0.14 | 0.09 | | IMMUNOGLOBULIN OPG2 FAB, | IMMUNE SYSTEM | |
| | | | | | | | | | CONSTANT DOMAIN; CHAIN: | IMMUNOGLOBULIN | |
| | | | | | | | | | L; IMMUNOGLOBULIN OPG2 | | |
| | | | | | | | | | FAB, VARIABLE DOMAIN; | | |
| | | | | | | | | | CHAIN: H; | | |
| 131 | 1c5c | H | 336 | 519 | 2.8e−51 | 0.10 | 0.06 | | CHIMERIC DECARBOXYLASE | IMMUNE SYSTEM | |
| | | | | | | | | | ANTIBODY 21D8; CHAIN: L; | IMMUNOGLOBULIN, CATALYTIC | |
| | | | | | | | | | CHIMERIC DECARBOXYLASE | ANTIBODY, CHIMERIC FAB, 2 | |
| | | | | | | | | | ANTIBODY 21D8; CHAIN: II; | DECARBOXYLASE, HAPTEN | |
| | | | | | | | | | | COMPLEX | |
| 131 | 1cic | B | 336 | 515 | 5.6e−51 | −0.00 | −0.02 | | IG HEAVY CHAIN V REGIONS; | IMMUNOGLOBULIN | |
| | | | | | | | | | CHAIN: A; IG HEAVY CHAIN V | IMMUNOGLOBULIN, FAB COMPLEX, | |
| | | | | | | | | | REGIONS; CHAIN: B; IG HEAVY | IDIOTOPE, ANTI-IDIOTOPE | |
| | | | | | | | | | CHAIN V REGIONS; CHAIN: C; | | |
| | | | | | | | | | IG HEAVY CHAIN V REGIONS; | | |
| | | | | | | | | | CHAIN: D; | | |
| 131 | 1cic | B | 48 | 244 | 2.8e−72 | 0.16 | −0.06 | | IG HEAVY CHAIN V REGIONS; | IMMUNOGLOBULIN | |
| | | | | | | | | | CHAIN: A; IG HEAVY CHAIN V | IMMUNOGLOBULIN, FAB COMPLEX, | |
| | | | | | | | | | REGIONS; CHAIN: B; IG HEAVY | IDIOTOPE, ANTI-IDIOTOPE | |
| | | | | | | | | | CHAIN V REGIONS; CHAIN: C; | | |
| | | | | | | | | | 10 HEAVY CHAIN V REGIONS; | | |
| | | | | | | | | | CHAIN: D; | | |
| 131 | 1c17 | I | 434 | 519 | 7e−25 | 0.08 | 0.09 | | IGG1_ANTIBODY 1696 (LIGHT | IMMUNE SYSTEM | |
| | | | | | | | | | CHAIN); CHAIN: L; IGG1 | IMMUNOGLOBULIN, IGG1; | |
| | | | | | | | | | ANTIBODY 1696 (VARIABLE | IMMUNOGLOBULIN, IGG1; | |
| | | | | | | | | | HEAVY CHAIN); CHAIN: H; | IMMUNOGLOBULIN, IGG1 FAB | |
| | | | | | | | | | IGG1 ANTIBODY 1696 | FRAGMENT, CROSS-REACTIVITY, | |
| | | | | | | | | | (CONSTANT HEAVY CHAIN); | HIV1 PROTEASE, ENZYME 2 | |
| | | | | | | | | | CHAIN: I; | INHIBITION, IMMUNOGLOBULIN | |
| 131 | 1cqk | A | 418 | 516 | 1.4e−25 | 0.23 | −0.11 | | CH3 DOMAIN OF MAK33 | IMMUNE SYSTEM CONSTANT | |
| | | | | | | | | | ANTIBODY; CHAiN: A, B; | DOMAIN, C1-SUBSET, | |
| | | | | | | | | | | IMMUNOGLOBULIN, IMMUNE | |
| | | | | | | | | | | SYSTEM | |
| 131 | 1cs6 | A | 135 | 515 | 3.4e−46 | 0.31 | 0.62 | | AXONIN-1; CHAIN: A; | CELL ADHESION NEURAL CELL | |
| | | | | | | | | | | ADHESION | |
| 131 | 1cs6 | A | 149 | 517 | 1.4e−35 | 0.19 | 0.77 | | AXONIN-1; CHAIN: A; | CELL ADHESION NEURAL CELL | |
| | | | | | | | | | | ADHESION | |
| 131 | 1cs6 | A | 244 | 602 | 1.1e−34 | 0.11 | 0.46 | | AXONIN-1; CHAIN: A; | CELL ADHESION NEURAL CELL | |
| | | | | | | | | | | ADHESION | |
| 131 | 1cs6 | A | 43 | 418 | 1.7e−56 | | | 125.44 | AXONIN-1; CHAIN: A; | CELL ADHESION NEURAL CELL | |
| | | | | | | | | | | ADHESION | |
| 131 | 1cs6 | A | 50 | 416 | 1.7e−56 | −0.10 | 0.71 | | AXONIN-1; CHAIN: A; | CELL ADHESION NEURAL CELL | |
| | | | | | | | | | | ADHESION | |
| 131 | 1dgi | R | 151 | 416 | 5.1e−28 | −0.23 | 0.47 | | POLIOVIRUS RECEPTOR; | VIRUS/VIRAL PROTEIN, RECEPTOR | |
| | | | | | | | | | CHAIN: R; VP1; CHAIN: 1; VP2; | CD155, PVR, HUMAN POLIOVIRUS, | |
| | | | | | | | | | CHAIN: 2; VP3; CHAIN: 3; VP4; | ELECTRON MICROSCOPY, 2 | |
| | | | | | | | | | CHAIN: 4; | POLIOVIRUS-RECEPTOR COMPLEX, | |
| | | | | | | | | | | VIRUS/VIRAL PROTEIN, RECEPTOR | |
| 131 | 1dgi | R | 49 | 331 | 3.4e−43 | | | 112.84 | POLIOVIRUS RECEPTOR; | VIRUS/VIRAL PROTEIN, RECEPTOR | |
| | | | | | | | | | CHAIN: R; VP1; CHAIN: 1; VP2; | CD155, PVR, HUMAN POLIOVIRUS, | |
| | | | | | | | | | CHAIN: 2; VP3; CHAIN: 3; VP4; | ELECTRON MICROSCOPY, 2 | |
| | | | | | | | | | CHAIN: 4; | POLIOVIRUS-RECEPTOR COMPLEX, | |
| | | | | | | | | | | VIRUS/VIRAL PROTEIN, RECEPTOR | |
| 131 | 1dgi | R | 52 | 331 | 3.4e−43 | −0.28 | 0.05 | | POLIOVIRUS RECEPTOR; | VIRUS/VIRAL PROTEIN, RECEPTOR | |
| | | | | | | | | | CHAIN: R; VPI; CHAIN: 1; VP2; | CD155, PVR, HUMAN POLIOVIRUS, | |
| | | | | | | | | | CHAIN: 2; VP3; CHAIN: 3; VP4; | ELECTRON MICROSCOPY, 2 | |
| | | | | | | | | | CHAIN: 4; | POLIOVIRUS-RECEPTOR COMPLEX, | |
| | | | | | | | | | | VIRUS/VIRAL PROTEIN, RECEPTOR | |
| 131 | 1dn2 | A | 250 | 415 | 1.3e−35 | −0.05 | 0.07 | | IMMUNOGLOBULIN LAMBDA | IMMUNE SYSTEM FC IGG PHAGE | |
| | | | | | | | | | HEAVY CHAIN; CHAIN: A, B; | DISPLAY PEPTIDE | |
| | | | | | | | | | ENGINEERED PEPTIDE; CHAIN: | | |
| | | | | | | | | | E, F; | | |
| 131 | 1e4k | A | 244 | 415 | 1.4e−36 | 0.26 | 0.06 | | LOW AFFINITY | COMPLEX CD16; IGG1-FC COMPLEX, | |
| | | | | | | | | | IMMUNOGLOBULIN GAMMA | FC FRAGMENT, IGG, FC, RECEPTOR, | |
| | | | | | | | | | FC RECEPTOR CHAIN: C; FC | CD16, GAMMA | |
| | | | | | | | | | FRAGMENT OF HUMAN IGG1; | | |
| | | | | | | | | | CHAIN: A, B; | | |
| 131 | 1e4x | H | 336 | 518 | 4.2e−51 | 0.32 | 0.27 | | TAB2; CHAIN: L, M; TAB2; | COMPLEX (ANTIBODY/ANTIGEN) | |
| | | | | | | | | | CHAIN: H, I; CYCLIC PEPTIDE; | CROSS-REACTIVITY PROTEIN- | |
| | | | | | | | | | CHAIN: P, Q | PEPTIDE RECOGNITION | |
| 131 | 1e4x | H | 48 | 247 | 1.4e−74 | 0.08 | −0.11 | | TAB2; CHAIN: L, M; TAB2; | COMPLEX (ANTIBODY/ANTIGEN) | |
| | | | | | | | | | CHAIN: H, I; CYCLIC PEPTIDE; | CROSS-REACTIVITY, PROTEIN- | |
| | | | | | | | | | CHAIN: P, Q | PEPTIDE RECOGNITION | |
| 131 | 1eap | B | 49 | 241 | 1.1e−65 | −0.06 | 0.29 | | CATALYTIC ANTIBODY 17E8 | | |
| | | | | | | | | | COMPLEXED WITH PHENYL [1- | | |
| | | | | | | | | | (1-N- | | |
| | | | | | | | | | SUCCINYLMINO)PENTYL] | | |
| | | | | | | | | | 1EAP 3 PHOSPHONATE 1EAP 4 | | |
| 131 | 1ejo | H | 51 | 244 | 1.1e−65 | 0.05 | 0.00 | | IGG2A MONOCLONAL | IMMUNE SYSTEM FMDV, ANTIGENIC- | |
| | | | | | | | | | ANTIBODY (LIGHT CHAIN); | ANTIBODY INTERACTIONS, RGD | |
| | | | | | | | | | CHAIN: L; IGG2A | MOTIF, G-H LOOP 2 OF VP1. | |
| | | | | | | | | | MONOCLONAL ANTIBODY | | |
| | | | | | | | | | (HEAVY CHAIN); CHAIN: H; | | |
| | | | | | | | | | FMDV PEPTIDE CHAIN: P; | | |
| 131 | 1evt | C | 247 | 416 | 8.5e−27 | 0.27 | 0.88 | | FIBROBLAST GROWTH | GROWTH FACTOR/GROWTH FACTOR | |
| | | | | | | | | | FACTOR 1; CHAIN: A, B; | RECEPTOR FGF1; FGFR1; | |
| | | | | | | | | | FIBROBLAST GROWTH | IMMUNOGLOBULIN (IG) LIKE | |
| | | | | | | | | | FACTOR RECEPTOR 1; CHAIN: | DOMAINS BELONGING TO THE I-SET | |
| | | | | | | | | | C, D; | 2 SUBGROUP WITHIN IG-LIKE | |
| | | | | | | | | | | DOMAINS, B-TREFOIL FOLD | |
| 131 | 1f2q | A | 250 | 420 | 1.2e−26 | 0.13 | 0.87 | | HIGH AFFINITY | IMMUNE SYSTEM FC-EPSILON RI- | |
| | | | | | | | | | IMMUNOGLOBULIN EPSILON | ALPHA; IMMUNOGLOBULIN FOLD, | |
| | | | | | | | | | RECEPTOR CHAIN: A; | GLYCOPROTEIN, RECEPTOR, IGE- | |
| | | | | | | | | | | BINDING 2 PROTEIN | |
| 131 | 1f6a | A | 246 | 420 | 5.1e−31 | 0.06 | 0.72 | | HIGH AFFINITY | IMMUNE SYSTEM HIGH AFFINITY | |
| | | | | | | | | | IMMUNOGLOBULIN EPSILON | IGE-FC RECEPTOR, FC(EPSILON) IGE- | |
| | | | | | | | | | RECEPTOR CHAIN: A; IG | FC; IMMUNGLOBULIN FOLD, | |
| | | | | | | | | | EPSILON CHIAN C REGION; | GLYCOPRTEIN, RECRPTOR, IGE- | |
| | | | | | | | | | CHAIN: B, D; | BINDING 2 PROTEIN, IGE ANTIBODY, | |
| | | | | | | | | | | IEC-FC | |
| 131 | 1fai | H | 48 | 241 | 8.4e−68 | 0.07 | −0.05 | | IMMUNOGLOBULIN FAB | | |
| | | | | | | | | | FRAGMENT FROM A | | |
| | | | | | | | | | MONOCLONAL ANTI- | | |
| | | | | | | | | | ARSONATE ANTIBODY, R19.9 | | |
| | | | | | | | | | 1FAI3 (IGG2B, KAPPA) 1FAI4 | | |
| 131 | 1fbi | H | 48 | 244 | 1.1e−72 | 0.05 | −0.17 | | COMPLEX | | |
| | | | | | | | | | ANTIBODY/ANTIGEN FAB | | |
| | | | | | | | | | FRAGMENT OF THE | | |
| | | | | | | | | | MONOCLONAL ANTIBODY | | |
| | | | | | | | | | F9.13.7 (IGG1) 1FBI 3 | | |
| | | | | | | | | | COMPLEXED WITH LYSOZYME | | |
| | | | | | | | | | (E.C.3.2.1.17) 1FBI4 | | |
| 131 | 1fc2 | D | 250 | 415 | 7e−36 | 0.07 | 0.06 | | IMMUNOGLOBULIN | | |
| | | | | | | | | | IMMUNOGLOBULLN PC AND | | |
| | | | | | | | | | FRAGMENT B OF PROTEIN A | | |
| | | | | | | | | | COMPLEX IFC2 4 | | |
| 131 | 1fgn | H | 337 | 514 | 7e−51 | 0.11 | 0.48 | | IMMUNOGLOBULLN FAB 5G9; | IMMUNOGLOBULIN FAB, FAB LIGHT | |
| | | | | | | | | | CHAIN: L, H; | CHAIN, FAB HEAVY CHAIN; | |
| | | | | | | | | | | ANTIBODY, FAB, ANTI-TF, | |
| | | | | | | | | | | MONOCLONAL, MURINE, | |
| | | | | | | | | | | IMMUNOGLOBULIN | |
| 131 | 1fh5 | H | 54 | 244 | 8.4e−66 | 0.14 | 0.07 | | MONOCLONAL ANTIBODY | IMMUNE SYSTEM FAB, BIP, CRYSTAL | |
| | | | | | | | | | MAK33; CHAIN: L; | STRUCTURE | |
| | | | | | | | | | MONOCLONAL ANTIBODY | | |
| | | | | | | | | | MAK33; CHAIN: H; | | |
| 131 | 1fl3 | A | 51 | 243 | 7e−66 | −0.02 | 0.06 | | BLUE FLUORESCENT | IMMUNE SYSTEM | |
| | | | | | | | | | ANTIBODY (19G2)-HEAVY | IMMUNOGLOBULIN FOLD | |
| | | | | | | | | | CHAIN; CHAIN: H, A; BLUE | | |
| | | | | | | | | | FLUORESCENT ANTIBODY | | |
| | | | | | | | | | (19G2)-LIGHT CHAIN; CHAIN: L, | | |
| | | | | | | | | | B; | | |
| 131 | 1for | H | 50 | 244 | 4.2e−72 | 0.03 | −0.06 | | IMMUNOGLOBULIN IGG2A | | |
| | | | | | | | | | FAD FRAGMENT (FAB17-IA) | | |
| | | | | | | | | | (ORTHORHOMBIC CRYSTAL | | |
| | | | | | | | | | FORM) 1FOR 3 | | |
| 131 | 1fsk | C | 336 | 519 | 1.4e−50 | 0.11 | 0.01 | | MAJOR POLLEN ALLERGEN | IMMUNE SYSTEM BET V I-A, BETVI | |
| | | | | | | | | | BET V 1-A; CHAIN: A, D, G, I; | ALLERGEN; BV16 FAB-FRAGMENT, | |
| | | | | | | | | | IMMUNOGLOBULIN KAPPA | KAPPA MOPC21 CODING SEQUENCE; | |
| | | | | | | | | | LIGHT CHAIN; CHAIN: B, E, H, | HEAVY CHAIN OF THE | |
| | | | | | | | | | K; ANTIBODY HEAVY CHAIN | MONOCLONAL ANTIBODY MST2; | |
| | | | | | | | | | FAB; CHAIN: C, F, I, L; | BET V 1, BV16 FAB FRAGMENT, | |
| | | | | | | | | | | ANTIBODY ALLERGEN COMPLEX | |
| 131 | 1fsk | C | 48 | 244 | 2.8e−72 | 0.05 | −0.14 | | MAJOR POLLEN ALLERGEN | IMMUNE SYSTEM BET V I-A, BETVI | |
| | | | | | | | | | BET V 1-A; CHAIN: A, D, G, J; | ALLERGEN; BV16 FAR-FRAGMENT, | |
| | | | | | | | | | IMMUNOGLOBULIN KAPPA | KAPPA MOPC21 CODING SEQUENCE; | |
| | | | | | | | | | LIGHT CHAIN; CHAIN: B, E, H, | HEAVY CHAIN OF THE | |
| | | | | | | | | | K; ANTIBODY HEAVY CHAIN | MONOCLONAL ANTIBODY MST2; | |
| | | | | | | | | | FAB; CHAIN: C, F, I, L; | BET V 1, BV16 FAR FRAGMENT, | |
| | | | | | | | | | | ANTIBODY ALLERGEN COMPLEX | |
| 131 | 1hi6 | B | 50 | 246 | 1.1e−70 | 0.29 | 0.22 | | IGG2A KAPPA ANTIBODY CB41 | COMPLEX (ANTIBODY/PEPTIDE) | |
| | | | | | | | | | (LIGHT CHAIN); CHAIN: A; | POLYSPECIFICITY, | |
| | | | | | | | | | IGG2A KAPPA ANTIBODY CB41 | CROSSREACTIVITY, FAB-FRAGMENT, | |
| | | | | | | | | | (HEAVY CHAIN); CHAIN: B; | PEPTIDE, 2 HIV-1 | |
| | | | | | | | | | PEPTIDE 5; CHAIN: C; | | |
| 131 | 1hzh | H | 163 | 521 | 4.2e−63 | 0.12 | 0.55 | | IMMUNOGLOBULIN HEAVY | IMMUNE SYSTEM IGG; | |
| | | | | | | | | | CHAIN; CHAIN: H, K; | IMMUNOGLOBULIN, ANTIBODY, B12 | |
| | | | | | | | | | IMMUNOGLOBULIN LIGHT | | |
| | | | | | | | | | CHAIN; CHAIN: L, M; | | |
| 131 | 1hzh | H | 48 | 418 | 0 | 0.28 | 0.55 | | IMMUNOGLOBULIN HEAVY | IMMUNE SYSTEM IGG; | |
| | | | | | | | | | CHAIN; CHAIN: H, K; | IMMUNOGLOBULIN, ANTIBODY, B12 | |
| | | | | | | | | | IMMUNOGLOBULIN LIGHT | | |
| | | | | | | | | | CHAIN; CHAIN: L, M; | | |
| 131 | lhzh | H | 4 | 320 | 1.4e−51 | −0.22 | 0.81 | | IMMUNOGLOBULIN HEAVY | IMMUNE SYSTEM IGG; | |
| | | | | | | | | | CHAIN; CHAIN: H, K; | IMMUNOGLOBULIN, ANTIBODY, B12 | |
| | | | | | | | | | IMMUNOGLOBULIN LIGHT | | |
| | | | | | | | | | CHAIN; CHAIN: L, M; | | |
| 131 | 1i1c | A | 251 | 415 | 7e−30 | 0.07 | −0.11 | | IGGAMMA-2A CHAIN C | IMMUNE SYSTEM IGG2A; IGG, FC | |
| | | | | | | | | | REGION; CHAIN: A, B; | | |
| 131 | 1ibg | H | 49 | 241 | 5.6e−67 | 0.10 | 0.13 | | IMMUNOGLOBULIN IGG FAB | | |
| | | | | | | | | | (IGG2B, KAPPA) FRAGMENT | | |
| | | | | | | | | | (40-50 FAB) COMPLEXED WITH | | |
| | | | | | | | | | 1IBG 3 OUABAIN 1IBG 4 | | |
| 131 | ligt | B | 160 | 517 | 9.8e−61 | −0.03 | 0.54 | | IGG2A INTACT ANTIBODY- | IMMUNOGLOBULIN INTACT | |
| | | | | | | | | | MAB231; CHAIN: A, B, C, D | IMMUNOGLOBULIN V REGION C | |
| | | | | | | | | | | REGION, IMMUNOGLOBULIN | |
| 131 | 1igt | B | 49 | 415 | 0 | 0.10 | 0.66 | | IGG2A INTACT ANTIBODY- | IMMUNOGLOBULIN INTACT | |
| | | | | | | | | | MAB231; CHAIN: A, B, C, D | IMMUNOGLOBULIN V REGION C | |
| | | | | | | | | | | REGION, IMMUNOGLOBULIN | |
| 131 | 1igt | B | 51 | 475 | 0 | | | 102.57 | IGG2A INTACT ANTIBODY- | IMMUNOGLOBULIN INTACT | |
| | | | | | | | | | MAB231; CHAIN: A, B, C, D | IMMUNOGLOBULIN V REGION C | |
| | | | | | | | | | | REGION, IMMUNOGLOBULIN | |
| 131 | 1igt | B | 5 | 318 | 2.8e−48 | −0.12 | 0.28 | | IGG2A INTACT ANTIBODY- | IMMUNOGLOBULIN INTACT | |
| | | | | | | | | | MAB231; CHAIN: A, B, C, D | IMMUNOGLOBULIN V REGION C | |
| | | | | | | | | | | REGION, IMMUNOGLOBULIN | |
| 131 | 1igy | B | 160 | 516 | 5.6e−61 | 0.04 | 0.64 | | IGG1 INTACT ANTIBODY | IMMUNOGLOBULIN INTACT | |
| | | | | | | | | | MAB61.1.3; CHAIN: A, B, C, D | IMMUNOGLOBULIN, V REGION, C | |
| | | | | | | | | | | REGION, HINGE REGION | |
| 131 | 1igy | B | 49 | 415 | 0 | −0.03 | 0.31 | | IGG1 INTACT ANTIBODY | IMMUNOGLOBULIN INTACT | |
| | | | | | | | | | MAB61.1.3; CHAIN: A, B, C, D | IMMUNOGLOBULIN, V REGION, C | |
| | | | | | | | | | | REGION, HINGE REGION | |
| 131 | 1i11 | A | 50 | 244 | 7e−68 | 0.06 | −0.02 | | MONOCLONAL ANTIBODY G3- | IMMUNE SYSTEM FAB, BETA SHEET | |
| | | | | | | | | | 519 (HEAVY CHAIN); CHAIN: A; | STRUCTURE, ANTIBODY | |
| | | | | | | | | | MONOCLONAL ANTIBODY G3- | | |
| | | | | | | | | | 519 (LIGHT CHAIN); CHAIN: B; | | |
| 131 | 1itb | B | 261 | 517 | 1e−36 | 0.15 | 0.71 | | INTERLEUKIN-1 BETA; CHAIN: | COMPLEX | |
| | | | | | | | | | A; TYPE 1 INTERLEUKIN-1 | (IMMUNOGLOBULIN/RECEPTOR) | |
| | | | | | | | | | RECEPTOR; CHAIN: B; | IMMUNOGLOBULIN FOLD, | |
| | | | | | | | | | | TRANSMEMBRANE, GLYCOPROTEIN, | |
| | | | | | | | | | | RECEPTOR, 2 SIGNAL, COMPLEX | |
| | | | | | | | | | | (IMMUNOGLOBULIN/RECEPTOR) | |
| 131 | 1kb5 | H | 49 | 244 | 2.8e−72 | 0.10 | 0.06 | | KB5-C20 T-CELL ANTIGEN | COMPLEX | |
| | | | | | | | | | RECEPTOR; CHAIN: A, B; | (IMMUNOGLOBULIN/RECEPTOR) TCR | |
| | | | | | | | | | ANTIBODY DESIRE-1; CHAIN: | VAPLHA VBETA DOMAIN; T-CELL | |
| | | | | | | | | | L, H; | RECEPTOR, STRAND SWITCH, FAB, | |
| | | | | | | | | | | ANTICLONOTYPIC, 2 | |
| | | | | | | | | | | (IMMUNOGLOBULIN/RECEPTOR) | |
| 131 | 1mco | H | 189 | 516 | 1.1e−67 | 0.05 | 0.01 | | IMMUNOGLOBULIN | | |
| | | | | | | | | | IMMUNOGLOBULIN G1 (IGG1) | | |
| | | | | | | | | | (MCG) WITH A HINGE | | |
| | | | | | | | | | DELETION 1MCO3 | | |
| 131 | 1mco | H | 48 | 415 | 0 | 0.05 | 0.66 | | IMMUNOGLOBULIN | | |
| | | | | | | | | | IMMUNOGLOBULIN G1 (IGG1) | | |
| | | | | | | | | | (MCG) WITH A HINGE | | |
| | | | | | | | | | DELETION 1MCO3 | | |
| 131 | 1mco | H | 49 | 475 | 0 | | | 106.26 | IMMUNOGLOBULIN | | |
| | | | | | | | | | IMMUNOGLOBULIN G1 (IGG1) | | |
| | | | | | | | | | (MCG) WITH A HINGE | | |
| | | | | | | | | | DELETION 1MCO 3 | | |
| 131 | 1mco | H | 5 | 320 | 2.8e−55 | −0.30 | 0.09 | | IMMUNOGLOBULIN | | |
| | | | | | | | | | IMMUNOGLOBULIN G1 (IGG1) | | |
| | | | | | | | | | (MCG) WITH A HINGE | | |
| | | | | | | | | | DELETION 1MCO 3 | | |
| 131 | 1mcp | H | 49 | 231 | 1.1e−48 | −0.07 | 0.11 | | IMMUNOGLOBULIN | | |
| | | | | | | | | | IMMUNOGLOBULIN FAB | | |
| | | | | | | | | | FRAGMENT (MC/PC$603) 1MCP | | |
| | | | | | | | | | 4 | | |
| 131 | 1m1b | B | 336 | 519 | 1.4e−50 | 0.16 | 0.07 | | IMMUNOGLOBULIN FAB D44.1 | | |
| | | | | | | | | | (IGG1, KAPPA) (BALB/C MOUSE, | | |
| | | | | | | | | | MONOCLONAL ANTIBODY) | | |
| | | | | | | | | | 1MLE 5 | | |
| 131 | 1pfc | | 417 | 520 | 2.8e−23 | 0.02 | −0.13 | | IMMUNOGLOBULIN | | |
| | | | | | | | | | $P/F$C(PRIME) FRAGMENT OF | | |
| | | | | | | | | | ANIG*G1 1PFC4 | | |
| 131 | 1plg | H | 48 | 243 | 4.2e−73 | 0.17 | −0.05 | | IGG2A = KAPPA =; 1PLG 4 CHAIN: | IMMUNOGLOBULIN | |
| | | | | | | | | | L, H; 1PLG 5 | | |
| 131 | 1psk | H | 49 | 240 | 1.4e−61 | −0.17 | 0.04 | | ANTIBODY; CHAIN: L, H; | IMMUNOGLOBULIN FAB, GD2- | |
| | | | | | | | | | | GANGLIOSIDE, CARBOHYDRATE, | |
| | | | | | | | | | | MELANOMA, IMMUNOGLOBULIN | |
| 131 | 1qfu | H | 336 | 518 | 1.3e−50 | 0.30 | 0.28 | | HEMAGGLUTININ (HA1 | VIRALPROTEIN/IMMUNE SYSTEM | |
| | | | | | | | | | CHAIN); CHAIN: A; | COMPLEX | |
| | | | | | | | | | HEMAGGLUTININ (HA2 | (HEMAGGLUTININ/IMMMUNOGLOBU | |
| | | | | | | | | | CHAIN); CHAIN: B; | LIN), HEMAGGLUTININ, 2 | |
| | | | | | | | | | IMMUNOGLOBULIN IGG1- | IMMUNOGLOBULIN, VIRAL | |
| | | | | | | | | | KAPPA ANTIBODY (LIGHT | PROTEIN/IMMUNE SYSTEM | |
| | | | | | | | | | CHAIN); CHAIN: L; | | |
| | | | | | | | | | IMMUNOGLOBULIN IGG1- | | |
| | | | | | | | | | KAPPA ANTIBODY (HEAVY | | |
| | | | | | | | | | CHAIN); CHAIN: H; | | |
| 131 | 1qfu | H | 48 | 244 | 1.4e−72 | 0.10 | −0.11 | | HEMAGGLUTININ (HA1 | VIRAL PROTEIN/IMMUNE SYSTEM | |
| | | | | | | | | | CHAIN); CHAIN: A | COMPLEX | |
| | | | | | | | | | HEMAGGLUTININ(HA2 | (HEMAGGLUTININ/IMMMUNOGLOBU | |
| | | | | | | | | | CHAIN); CHAIN: B; | LIN), HEMAGGLUTININ, 2 | |
| | | | | | | | | | IMMUNOGLOBULIN IGG1- | IMMUNOGLOBULIN, VIRAL | |
| | | | | | | | | | KAPPA ANTIBODY (LIGHT | PROTEIN/IMMUNE SYSTEM | |
| | | | | | | | | | CHAIN); CHAIN: L; | | |
| | | | | | | | | | IMMUNOGLOBULIN IGG1- | | |
| | | | | | | | | | KAPPA ANTIBODY (HEAVY | | |
| | | | | | | | | | CHAIN); CHAIN: H; | | |
| 131 | 1vge | H | 51 | 244 | 1.4e−66 | −0.10 | 0.18 | | TR1.9 FAP; CHAIN: L, H; | IMMUNOGLOBULIN TR1.9, ANTI- | |
| | | | | | | | | | | THYROID PEROXIDASE, | |
| | | | | | | | | | | AUTOANTIBODY, 2 | |
| | | | | | | | | | | IMMUNOGLOBULIN | |
| 131 | 1wej | H | 336 | 520 | 8.4e−51 | 0.24 | 0.27 | | E8 ANTIBODY; CHAIN: L, H; | COMPLEX (ANTIBODY/ELECTRON | |
| | | | | | | | | | CYTOCHROME C; CHAIN: F; | TRANSPORT) FAB E8; CYT C, | |
| | | | | | | | | | | ANTIGEN; IMMUNOGLOBULIN, IGG1 | |
| | | | | | | | | | | KAPPA, FAB FRAGMENT, HORSE 2 | |
| | | | | | | | | | | CYTOCHROME C, COMPLEX | |
| | | | | | | | | | | (ANTIBODY/ELECTRON TRANSPORT) | |
| 131 | 1yej | H | 50 | 244 | 8.4e−69 | 0.18 | −0.01 | | IG ANTIBODY D2.3 (LIGHT | IMMUNE SYSTEM ABZYME, | |
| | | | | | | | | | CHAIN); CHAIN: L; IG | TRANSITION STATE ANALOG, | |
| | | | | | | | | | ANTIBODY D2.3 (HEAVY | IMMUNE SYSTEM | |
| | | | | | | | | | CHAIN); CHAIN: H; | | |
| 131 | 25c8 | H | 336 | 515 | 1.4e−51 | 0.11 | 0.16 | | IGG 5C8; CHAIN: L, H; | CATALYTIC ANTIBODY CATALYTIC | |
| | | | | | | | | | | ANTIBODY, FAD, RING CLOSURE | |
| | | | | | | | | | | REACTION | |
| 131 | 2fbj | H | 49 | 231 | 7e−51 | −0.03 | 0.04 | | IMMUNOGLOBULIN IG*A FAD | | |
| | | | | | | | | | FRAGMENT (J539) (GALACTAN- | | |
| | | | | | | | | | BINDING) 2FBJ 3 | | |
| 131 | 2fcb | A | 249 | 419 | 3.4e−28 | 0.11 | 0.74 | | FC GAMMA RIIB; CHAIN: A; | IMMUNE SYSTEM CD32; RECEPTOR, | |
| | | | | | | | | | | FC, CD32, IMMUNE SYSTEM | |
| 131 | 3fct | B | 336 | 518 | 4.2e−50 | 0.22 | 0.09 | | METAL CHELATASE | IMMUNE SYSTEM METAL | |
| | | | | | | | | | CATALYTIC ANTIBODY; | CHELATASE, CATALYTIC ANTIBODY, | |
| | | | | | | | | | CHAIN: A, C; METAL | FAB FRAGMENT, IMMUNE 2 SYSTEM | |
| | | | | | | | | | CHELATASE CATALYTIC | | |
| | | | | | | | | | ANTIBODY; CHAIN: B, D; | | |
| 132 | 1cdq | | 88 | 164 | 8.4e−20 | 0.59 | 1.00 | | COMPLEMENT REGULATORY | | |
| | | | | | | | | | PROTEIN CD59 (NMR, 20 | | |
| | | | | | | | | | STRUCTURES) 1CDQ3 | | |
| 132 | 1cdq | | 88 | 164 | 8.4e−20 | | | 142.11 | COMPLEMENT REGULATORY | | |
| | | | | | | | | | PROTEIN CD59 (NMR, 20 | | |
| | | | | | | | | | STRUCTURES) 1CDQ 3 | | |
| 132 | 1erg | | 88 | 157 | 2.8e−19 | 0.41 | 1.00 | | COMPLEMENT FACTOR | | |
| | | | | | | | | | HUMAN COMPLEMENT | | |
| | | | | | | | | | REGULATORY PROTEIN CD59 | | |
| | | | | | | | | | (EXTRACELLULAR 1ERG 3 | | |
| | | | | | | | | | REGION, RESIDUES 1-70) | | |
| | | | | | | | | | (NMR, RESTRAINED | | |
| | | | | | | | | | MINIMIZED 1ERG 4 AVERAGE | | |
| | | | | | | | | | STRUCTURE) 1ERG 5 | | |
| 132 | 1erg | | 88 | 157 | 2.8e−19 | | | 131.94 | COMPLEMENT FACTOR | | |
| | | | | | | | | | HUMAN COMPLEMENT | | |
| | | | | | | | | | REGULATORY PROTEIN CD59 | | |
| | | | | | | | | | (EXTRACELLULAR 1ERG 3 | | |
| | | | | | | | | | REGION, RESIDUES 1-70) | | |
| | | | | | | | | | (NMR, RESTRAINED | | |
| | | | | | | | | | MINIMIZED IERG 4 AVERAGE | | |
| | | | | | | | | | STRUCTURE) 1ERG 5 | | |
| 136 | 1a1n | A | 11 | 199 | 0 | | | 232.06 | B*3501; CHAIN: A, B; PEPTIDE | COMPLEX (ANTIGEN/PEPTIDE) B35; | |
| | | | | | | | | | VPLRPMTY; CHAIN: C; | MAJOR HISTOCOMPATIBILITY | |
| | | | | | | | | | | ANTIGEN, MHC, HLA, HLA-B3501, | |
| | | | | | | | | | | HIV, 2 NEF, COMPLEX | |
| | | | | | | | | | | (ANTIGEN/PEPTIDE) | |
| 136 | 1a1n | A | 25 | 299 | 0 | | | 410.38 | B*3501; CHAIN: A, B; PEPTIDE | COMPLEX (ANTIGEN/PEPTIDE) B35; | |
| | | | | | | | | | VPLRPMTY; CHAIN: C; | MAJOR HISTOCOMPATIBILITY | |
| | | | | | | | | | | ANTIGEN, MHC, HLA, HLA-B3501, | |
| | | | | | | | | | | HIV, 2 NEF, COMPLEX | |
| | | | | | | | | | | (ANTIGENIPEPTIDE) | |
| 136 | 1a1n | A | 25 | 300 | 0 | 0.83 | 1.00 | | B*3501; CHAIN: A, B; PEPTIDE | COMPLEX (ANTIGEN/PEPTIDE) B35; | |
| | | | | | | | | | VPLRPMTY; CHAIN: C; | MAJOR HISTOCOMPATIBILITY | |
| | | | | | | | | | | ANTIGEN, MHC, HLA, HLA-B3501, | |
| | | | | | | | | | | HIV, 2 NEF, COMPLEX | |
| | | | | | | | | | | (ANTIGEN/PEPTIDE) | |
| 136 | 1agd | A | 11 | 199 | 0 | | | | 233.86 | B*0801; CHAIN: A; BETA-2 | HISTOCOMPATIBILITY COMPLEX B8; |
| | | | | | | | | | MICROGLOBULIN; CHAIN: B; | B2M; PEPTIDE HLA B8, HIV, MHC | |
| | | | | | | | | | HIV-1 GAG PEPTIDE | CLASS I, HISTOCOMPATIBILITY | |
| | | | | | | | | | (GGKKXYKL-INDEX | COMPLEX | |
| | | | | | | | | | PEPTIDE); CHAIN: C; | | |
| 136 | 1agd | A | 25 | 299 | 0 | | | 411.64 | B*0801; CHAIN: A; BETA-2 | HISTOCOMPATIBILITY COMPLEX B8; | |
| | | | | | | | | | MICROGLOBULIN; CHAIN: B; | B2M; PEPTIDE HLA B8, HIV, MHC | |
| | | | | | | | | | HIV-1 GAG PEPTIDE | CLASS I, HISTOCOMPATIBILLTY | |
| | | | | | | | | | (GGKKKYKL-INDEX | COMPLEX | |
| | | | | | | | | | PEPTIDE); CHAIN: C; | | |
| 136 | 1agd | A | 25 | 300 | 0 | 0.79 | 1.00 | | B*0801; CHAIN: A; BETA-2 | HISTOCOMPATIBILITY COMPLEX B8; | |
| | | | | | | | | | MICROGLOBULIN; CHAIN: B; | B2M; PEPTIDE HLA B8, HIV, MHG | |
| | | | | | | | | | HIV-1 GAG PEPTIDE | CLASS I, HISTOCOMPATIBILITY | |
| | | | | | | | | | (GGKKKYKL-INDEX | COMPLEX | |
| | | | | | | | | | PEPTIDE); CHAIN: C; | | |
| 136 | 1efx | A | 25 | 302 | 0 | 0.87 | 1.00 | | HLA-CW3 (HEAVY CHAIN); | IMMUNE SYSTEM MHC, HLA, CLASS | |
| | | | | | | | | | CHAIN: A; BETA-2- | I, KIR, NK CELL RECEPTOR, | |
| | | | | | | | | | MICROGLOBULIN; CHAIN: B; | IMMUNOGLOBULIN 2 FOLD, | |
| | | | | | | | | | PEPTIDE FROM IMPORTIN | RECEPTOR/MHC COMPLEX | |
| | | | | | | | | | ALPHA-2; CHAIN: C; NATURAL | | |
| | | | | | | | | | KILLER CELL RECEPTOR | | |
| | | | | | | | | | KIR2DL2; CHAIN: D, E; | | |
| 136 | 1efx | A | 25 | 302 | 0 | | | 420.37 | HLA-CW3 (HEAVY CHAIN); | IMMUNE SYSTEM MHG, HLA, CLASS | |
| | | | | | | | | | CHAIN: A; BETA-2- | I, KIR, NK CELL RECEPTOR, | |
| | | | | | | | | | MICROGLOBULIN; CHAIN: B; | IMMUNOGLOBULIN 2 FOLD, | |
| | | | | | | | | | PEPTIDE FROM IMPORTIN | RECEPTOR/MHC COMPLEX | |
| | | | | | | | | | ALPHA-2; CHAIN: C; NATURAL | | |
| | | | | | | | | | KILLER CELL RECEPTOR | | |
| | | | | | | | | | KIR2DL2; CHAIN: D, E; | | |
| 136 | 1hsa | A | 11 | 199 | 0 | | | 232.10 | HISTOCOMPATIBILITY | | |
| | | | | | | | | | ANTIGEN HUMAN CLASS I | | |
| | | | | | | | | | HISTOCOMPATIBILITY | | |
| | | | | | | | | | ANTIGEN 1HSA 3/HLA- | | |
| | | | | | | | | | B(ASTERISK)2705$ 1HSA 4 | | |
| 136 | 1hsa | A | 25 | 299 | 0 | | | 410.78 | HISTOCOMPATIBILITY | | |
| | | | | | | | | | ANTIGEN HUMAN CLASS I | | |
| | | | | | | | | | HISTOCOMPATIBILITY | | |
| | | | | | | | | | ANTIGEN 1HSA 3/HLA- | | |
| | | | | | | | | | B(ASTERISK)2705$ 1HSA 4 | | |
| 136 | 1hsa | A | 25 | 300 | 0 | 0.82 | 1.00 | | HISTOCOMPATIBILITY | | |
| | | | | | | | | | ANTIGEN HUMAN CLASS I | | |
| | | | | | | | | | HISTOCOMPATIBILITY | | |
| | | | | | | | | | ANTIGEN 1HSA 3/HLA- | | |
| | | | | | | | | | B(ASTERJSK)2705$ 1HSA 4 | | |
| 136 | 1hsb | A | 11 | 199 | 0 | | | 257.74 | HISTOCOMPATIBILITY | | |
| | | | | | | | | | ANTIGEN CLASS I | | |
| | | | | | | | | | HISTOCOMPATIBILITY | | |
| | | | | | | | | | ANTIGEN AW68.1 (LEUCOCYTE | | |
| | | | | | | | | | 1HSB 3 ANTIGEN) 1HSB 4 | | |
| 136 | 1hsb | A | 25 | 294 | 0 | 0.86 | 1.00 | | HISTOCOMPATIBILITY | | |
| | | | | | | | | | ANTIGEN CLASS I | | |
| | | | | | | | | | HISTOCOMPATIBILITY | | |
| | | | | | | | | | ANTIGEN AW68.1 (LEUCOCYTE | | |
| | | | | | | | | | 1HSB 3 ANTIGEN) 1HSB 4 | | |
| 136 | 1hsb | A | 25 | 294 | 0 | | | 414.03 | HISTOCOMPATIBILITY | | |
| | | | | | | | | | ANTIGEN CLASS I | | |
| | | | | | | | | | HISTOCOMPATIBILITY | | |
| | | | | | | | | | ANTIGEN AW68.1 (LEUCOCYTE | | |
| | | | | | | | | | 1HSB 3 ANTIGEN) 1HSB 4 | | |
| 136 | 1i4f | A | 11 | 199 | 1.4e−100 | | | 263.59 HLA CLASS I | IMMUNE SYSTEM MAGE-4 ANTIGEN; | | |
| | | | | | | | | | HISTOCOMPATIBILITY | MAJOR HISTOCOMPATIBILITY | |
| | | | | | | | | | ANTIGEN, A-2 CHAIN: A; BETA- | COMPLEX, HUMAN LEUKOCYTE | |
| | | | | | | | | | 2-MICROGLOBULIN; CHAIN: B; | ANTIGEN, 2 MELANOMA- | |
| | | | | | | | | | MELANOMA-ASSOCIATED | ASSOCIATED ANTIGEN | |
| | | | | | | | | | ANTIGEN 4; CHAIN: C; | | |
| 136 | 1i4f | A | 25 | 299 | 0 | 0.83 | 1.00 | | HLA CLASS I | IMMUNE SYSTEM MAGE-4 ANTIGEN; | |
| | | | | | | | | | HISTOCOMPATIBILITY | MAJOR HISTOCOMPATIBILITY | |
| | | | | | | | | | ANTIGEN, A-2 CHAIN: A; BETA- | COMPLEX, HUMAN LEUKOCYTE | |
| | | | | | | | | | 2-MICROGLOBULIN; CHAIN: B; | ANTIGEN, 2 MELANOMA- | |
| | | | | | | | | | MELANOMA-ASSOCIATED | ASSOCIATED ANTIGEN | |
| | | | | | | | | | ANTIGEN 4; CHAIN: C; | | |
| 136 | 1i4f | A | 25 | 299 | 0 | | | 435.50 | HLA CLASS I | IMMUNE SYSTEM MAGE-4 ANTIGEN; | |
| | | | | | | | | | HISTOCOMPATlBILITY | MAJOR HiSTOCOMPATIBILITY | |
| | | | | | | | | | ANTIGEN, A-2 CHAIN: A; BETA- | COMPLEX, HUMAN LEUKOCYTE | |
| | | | | | | | | | 2-MICROGLOBULIN; CHAIN: B; | ANTIGEN, 2 MELANOMA- | |
| | | | | | | | | | MELANOMA-ASSOCIATED | ASSOCIATED ANTIGEN | |
| | | | | | | | | | ANTIGEN 4; CHAIN: C; | | |
| 136 | 1qqd | A | 12 | 199 | 0 | | | 232.33 | HISTOCOMPATIBILITY | IMMUNE SYSTEM | |
| | | | | | | | | | LEUKOCYTE ANTIGEN (HLA)- | IMMUNOGLOBULIN (IG)-LIKE | |
| | | | | | | | | | CW4 CHAIN: A; BETA-2 | DOMAIN, ALPHA HELIX, BETA | |
| | | | | | | | | | MICROGLOBULIN; CHAIN: B; | SHEET, 2 IMMUNE SYSTEM | |
| | | | | | | | | | HLA-CW4 SPECIFIC PEPTIDE; | | |
| | | | | | | | | | CHAIN: C; | | |
| 136 | 1qqd | A | 26 | 298 | 0 | 0.87 | 1.00 | | HISTOCOMPATIBILITY | IMMUNE SYSTEM | |
| | | | | | | | | | LEUKOCYTE ANTIGEN (HLA)- | IMMUNOGLOBULIN (IG)-LIKE | |
| | | | | | | | | | CW4 CHAIN: A; BETA-2 | DOMAIN, ALPHA HELIX, BETA | |
| | | | | | | | | | MICROGLOBULIN; CHAIN: B; | SHEET, 2 IMMUNE SYSTEM | |
| | | | | | | | | | HLA-CW4 SPECIFIC PEPTIDE; | | |
| | | | | | | | | | CHAIN: C; | | |
| 136 | 1qqd | A | 26 | 298 | 0 | | | 407.96 | HISTOCOMPATIBILITY | IMMUNE SYSTEM | |
| | | | | | | | | | LEUKOCYTE ANTIGEN (HLA)- | IMMUNOGLOBULIN (LG)-LIKE | |
| | | | | | | | | | CW4 CHAIN: A; BETA-2 | DOMAIN, ALPHA HELIX, BETA | |
| | | | | | | | | | MICROGLOBULIN; CHAIN: B; | SHEET, 2 IMMUNE SYSTEM | |
| | | | | | | | | | HLA-CW4 SPECIFIC PEPTIDE; | | |
| | | | | | | | | | CHAIN: C; | | |
| 136 | 1tmc | A | 11 | 185 | 2.8e−94 | | | 284.63 | HISTOCOMPATIBILITY | | |
| | | | | | | | | | ANTIGEN TRUNCATED HUMAN | | |
| | | | | | | | | | CLASS 1 HISTOCOMPATIBILITY | | |
| | | | | | | | | | ANTIGEN HLA-AW68 1TMC 3 | | |
| | | | | | | | | | COMPLEXED WITH A | | |
| | | | | | | | | | DECAMERIC PEPTIDE | | |
| | | | | | | | | | (EVAPPEYHRK) 1TMC 4 | | |
| 137 | 1efx | A | 11 | 199 | 0 | | | 241.21 | HLA-CW3 (HEAVY CHAIN); | IMMUNE SYSTEM MHC, HLA, CLASS | |
| | | | | | | | | | CHAIN: A; BETA-2- | I, KIR, NK CELL RECEPTOR, | |
| | | | | | | | | | MICROGLOBULIN; CHAIN: B; | IMMUNOGLOBULIN 2 FOLD, | |
| | | | | | | | | | PEPTIDE FROM IMPORTIN | RECEPTORIMHC COMPLEX | |
| | | | | | | | | | ALPHA-2; CHAIN: C; NATURAL | | |
| | | | | | | | | | KILLER CELL RECEPTOR | | |
| | | | | | | | | | KIR2DL2; CHAIN: D, E; | | |
| 137 | 2ebo | A | 12 | 88 | 4.2e−18 | −0.74 | 0.29 | | EBOLA VIRUS ENVELOPE | ENVELOPE GLYCOPROTEIN | |
| | | | | | | | | | GLYCOPROTEIN; CHAIN: A, B, | ENVELOPE GLYCOPROTEIN, | |
| | | | | | | | | | C; | FILOVIRUS, EBOLA VIRUS, GP2, | |
| | | | | | | | | | | COAT 2 PROTEIN | |
| 139 | 1cdy | | 32 | 133 | 3.4e−07 | 0.40 | 0.19 | | T-CELL SURFACE | T-CELL SURFACE GLYCOPROTEIN | |
| | | | | | | | | | GLYCOPROTEIN CD4; CHAIN: | IMMUNOGLOBULIN FOLD, | |
| | | | | | | | | | NULL; | TRANSMEMLBRANE, GLYCOPROTEIN, | |
| | | | | | | | | | | T-CELL, 2 MHC, LIPOPROTEIN, T- | |
| | | | | | | | | | | CELL SURFACE GLYCOPROTEIN | |
| 139 | 1dgi | R | 25 | 127 | 2.8e−29 | 0.41 | 0.46 | | POLIOVIRUS RECEPTOR; | VIRUS/VIRAL PROTEIN, RECEPTOR | |
| | | | | | | | | | CHAIN: R; VP1; CHAIN: 1; VP2; | CD155, PVR, HUMAN POLIOVIRUS, | |
| | | | | | | | | | CHAIN: 2; VP3; CHAIN: 3; VP4; | ELECTRON MICROSCOPY, 2 | |
| | | | | | | | | | CHAIN: 4; | POLIOVIRUS-RECEPTOR COMPLEX, | |
| | | | | | | | | | | VIRUS/VIRAL PROTEIN, RECEPTOR | |
| 139 | 1dr9 | A | 32 | 126 | 8.5e−10 | 0.33 | 0.06 | | T LYMPHOCYTE ACTIVATION | IMMUNE SYSTEM B7-1 (CD80); IG | |
| | | | | | | | | | ANTIGEN; CHAIN: A; | SUPERFAMILY | |
| 139 | 1eaj | A | 33 | 127 | 1.7e−07 | 0.41 | −0.03 | | CONSACKIE VIRUS AND | VIRUS/VIRAL PROTEIN RECEPTOR | |
| | | | | | | | | | ADENOVIRUS RECEPTOR; | COXSACKIE VIRUS B-ADENO VIRUS | |
| | | | | | | | | | CHAIN: A, B; | RECEPTOR, HCAR, VIRUS/VIRAL | |
| | | | | | | | | | | PROTEIN RECEPTOR, | |
| | | | | | | | | | | IMMUNOGLOBULIN V DOMAIN | |
| | | | | | | | | | | FOLD, 2 SYMMETRIC DIMER | |
| 139 | 1hxm | B | 20 | 123 | 1.5e−06 | 0.36 | 0.06 | | GAMMA-DELTA T-CELL | IMMUNE SYSTEM T-CELL RECEPTOR | |
| | | | | | | | | | RECEPTOR; CHAIN: A, C, E, D; | DELTA CHAIN; T-CELL RECEPTOR | |
| | | | | | | | | | GAMMA-DELTA T-CELL | GAMMA CHAIN; IG DOMAIN, T CELL | |
| | | | | | | | | | RECEPTOR; CHAIN: B, D, F, H; | RECEPTOR, TCR, GDTCR | |
| 139 | 1i81 | C | 33 | 120 | 8.5 e−06 | 0.12 | 0.80 | | TLYMPHOCYTE ACTIVATION | IMMUNE SYSTEM ACTIVATION B7-1 | |
| | | | | | | | | | ANTIGEN CD80; CHAIN: A, B; | ANTIGEN, CTLA-4 COUNTER- | |
| | | | | | | | | | CYTOTOXIC T-LYMPHOCYTE | RECEPTOR CTLA-4, CYTOTOXIC T- | |
| | | | | | | | | | PROTEIN 4; CHAIN: C, D; | LYMPHOCYTE-ASSOCIATED | |
| | | | | | | | | | | ANTIGEN RECEPTORS, INHIBITORY | |
| | | | | | | | | | | COMPLEX | |
| 139 | 1ii1 | G | 32 | 131 | 7e−06 | 0.21 | −0.03 | | HEPARIN-BINDING GROWTH | GROWTH FACTOR/GROWTH FACTOR | |
| | | | | | | | | | FACTOR 2; CHAIN: A, B, C, D; | RECEPTOR FGF2, HBGF-2, BASIC | |
| | | | | | | | | | FIBROBLAST GROWTH | FIBROBLAST GROWTH FACTOR, | |
| | | | | | | | | | FACTOR RECEPTOR 2; CHAIN: | FGFR2, KERATINOCYTE GROWTH | |
| | | | | | | | | | E, F, 0, H; | FACTOR RECEPTOR; | |
| | | | | | | | | | | IMMUNOGLOBULIN LIKE DOMAIN, B- | |
| | | | | | | | | | | TREFOIL | |
| 139 | 1neu | | 27 | 128 | 6.8e−11 | 0.56 | 0.13 | | MYELIN P0 PROTEIN; CHAIN: | STRUCTURAL PROTEIN MYELIN, | |
| | | | | | | | | | NULL; | STRUCTURAL PROTEIN, | |
| | | | | | | | | | | GLYCOPROTEIN, TRANSMEMBRANE, | |
| | | | | | | | | | | PHOSPHORYLATION, | |
| | | | | | | | | | | IMMUNOGLOBULIN FOLD, SIGNAL, | |
| | | | | | | | | | | MYELIN 2 MEMBRANE ADHESION | |
| | | | | | | | | | | MOLECULE | |
| 139 | 2cd0 | A | 29 | 127 | 8.4e−06 | 0.35 | 0.31 | | BENCE-JONES PROTEIN WIL, A | IMMUNE SYSTEM | |
| | | | | | | | | | VARIABLE DOMAIN FROM | IMMUNOGLOBULIN, BENCE-JONES | |
| | | | | | | | | | CHAIN: A, B; | PROTEIN, LAMBDA-6 | |
| 141 | 1tgx | A | 55 | 98 | 0.0031 | −0.49 | 0.01 | | CYTOTOXIN TOXIN GAMMA | | |
| | | | | | | | | | (CARDIOTOXIN) 1TGX 3 | | |
| 141 | 2crs | | 55 | 98 | 0.0023 | −0.25 | 0.00 | | CARDIOTOXIN CARDIOTOXIN | | |
| | | | | | | | | | III (NMR, 13 STRUCTURES) | | |
| | | | | | | | | | 2CRS 3 | | |
| 143 | 1a5e | | 117 | 272 | 8.4e−20 | | | 74.90 | TUMOR SUPPRESSOR | ANTI-ONCOGENE CELL CYCLE, ANTI- | |
| | | | | | | | | | P16INK4A; CHAIN: NULL; | ONCOGENE, REPEAT, ANK REPEAT | |
| 143 | 1awc | B | 95 | 244 | 7e−38 | | | 75.28 | GA BINDING PROTEIN ALPHA; | COMPLEX (TRANSCRIPTION | |
| | | | | | | | | | CHAIN: A; GA BINDING | REGULATION/DNA) GABPALPHA; | |
| | | | | | | | | | PROTEIN BETA 1; CHAIN: B; | GABPBETA1; COMPLEX | |
| | | | | | | | | | DNA; CHAIN: D, E; | (TRANSCRIPTION | |
| | | | | | | | | | | REGULATION/DNA), DNA-BINDING, 2 | |
| | | | | | | | | | | NUCLEAR PROTEIN, ETS DOMAIN, | |
| | | | | | | | | | | ANKYRIN REPEATS, TRANSCRIPTION | |
| | | | | | | | | | | 3 FACTOR | |
| 143 | 1bd8 | | 93 | 247 | 4.2e−31 | | | 71.99 | P19INK4D CDK4/6 INHIBITOR; | TUMOR SUPPRESSOR TUMOR | |
| | | | | | | | | | CHAIN: NULL; | SUPPRESSOR, CDK4/6 INHIBITOR, | |
| | | | | | | | | | | ANKYRIN MOTIF | |
| 143 | 1blx | B | 95 | 250 | 2.8e−31 | | | 71.23 | CYCLIN-DEPENDENT KINASE | COMPLEX (INHIBITOR | |
| | | | | | | | | | 6; CHAIN: A; P19INK4D; CHAIN: | PROTEIN/KINASE) INHIBITOR | |
| | | | | | | | | | B; | PROTEIN, CYCLIN-DEPENDENT | |
| | | | | | | | | | | KINASE, CELL CYCLE 2 CONTROL, | |
| | | | | | | | | | | ALPHA/BETA, COMPLEX (INHIBITOR | |
| | | | | | | | | | | PROTEIN/KINASE) | |
| 143 | 1bu9 | A | 91 | 255 | 4.2e−33 | | | 80.55 | CYCLIN-DEPENDENT KINASE 6 | HORMONE/GROWTH FACTOR P18- | |
| | | | | | | | | | INHIBITOR; CHAIN: A; | INK4C; CELL CYCLE INHIBITOR, | |
| | | | | | | | | | | P18INK4C, TUMOR, SUPPRESSOR, | |
| | | | | | | | | | | CYCLIN-2 DEPENDENT KINASE, | |
| | | | | | | | | | | HORMONE/GROWTH FACTOR | |
| 143 | 1by2 | | 1 | 113 | 8.4e−44 | | | 114.47 | MAC-2 BINDING PROTEIN; | EXTRACELLULAR MODULE TUMOR- | |
| | | | | | | | | | CHAIN: NULL; | ASSOCIATED ANTIGEN 90K; | |
| | | | | | | | | | | EXTRACELLULAR MODULE, | |
| | | | | | | | | | | SCAVENGER RECEPTOR, TUMOUR- | |
| | | | | | | | | | | ASSOCIATED 2 ANTIGEN, | |
| | | | | | | | | | | EXTEACELLULAR MATRIX, | |
| | | | | | | | | | | GLYCOSYLATED PROTEIN | |
| 143 | 1by2 | | 711 | 824 | 7e−44 | | | 113.40 | MAC-2 BINDING PROTEIN; | EXTRACELLULAR MODULE TUMOR- | |
| | | | | | | | | | CHAIN: NULL; | ASSOCIATED ANTIGEN 90K; | |
| | | | | | | | | | | EXTRACELLULAR MODULE, | |
| | | | | | | | | | | SCAVENGER RECEPTOR, TUMOUR- | |
| | | | | | | | | | | ASSOCIATED 2 ANTIGEN, | |
| | | | | | | | | | | EXTRACELLULAR MATRIX, | |
| | | | | | | | | | | GLYCOSYLATED PROTRIN | |
| 143 | 1by2 | | 714 | 822 | 7e−44 | 0.79 | 1.00 | | MAC-2 BINDING PROTEIN; | EXTRACELLULAR MODULE TUMOR- | |
| | | | | | | | | | CHAIN: NULL; | ASSOCIATED ANTIGEN 90K; | |
| | | | | | | | | | | EXTRACELLULAR MODULE, | |
| | | | | | | | | | | SCAVENGER RECEPTOR, TUMOUR- | |
| | | | | | | | | | | ASSOCIATED 2 ANTIGEN, | |
| | | | | | | | | | | EXTRACELLULAR MATRIX, | |
| | | | | | | | | | | GLYCOSYLATED PROTEIN | |
| 143 | 1cru | A | 217 | 709 | 1.4e−74 | | | 146.51 | SOLUBLE QUINOPROTEIN | OXIDOREDUCTASE BETA- | |
| | | | | | | | | | GLUCOSE DEHYDROGENASE; | PROPELLER, SUPERBARREL, | |
| | | | | | | | | | CHAIN: A, B; | COMPLEX WITH THE COFACTOR PQQ | |
| | | | | | | | | | | 2 AND THE INHIBITOR | |
| | | | | | | | | | | METHYLHYDRAZINE, | |
| | | | | | | | | | | OXIDOREDUCTASE | |
| 143 | 1cru | A | 218 | 645 | 1.4e−74 | 0.34 | 0.92 | | SOLUBLE QUINOPROTEIN | OXIDOREDUCTASE BETA- | |
| | | | | | | | | | GLUCOSE DEHYDROGENASE; | PROPELLER, SUPERBARREL, | |
| | | | | | | | | | CHAIN: A, B; | COMPLEX WITH THE COFACTOR PQQ | |
| | | | | | | | | | | 2 AND THE INHIBITOR | |
| | | | | | | | | | | METHYLHYDRAZINE, | |
| | | | | | | | | | | OXIDOREDUCTASE | |
| 143 | 1d9s | A | 2 | 129 | 2.8e−07 | | | 51.72 | CYCLIN-DEPENDENT KINASE4 | SIGNALING PROTEIN HELIX-TURN- | |
| | | | | | | | | | INHIBITOR B; CHAIN: A; | HELIX, ANKYRIN REPEAT | |
| 143 | 1ihb | A | 96 | 246 | 4.2e−33 | | | 78.44 | CYCLIN-DEPENDENTKINASE 6 | CELL CYCLE INHIBITOR P18- | |
| | | | | | | | | | INHIBITOR; CHAIN: A, B; | INK4C(INK6); CELL CYCLE | |
| | | | | | | | | | | INHIBITOR, P18-INK4C(INK6), | |
| | | | | | | | | | | ANKYRIN REPEAT, 2 CDK 4/6 | |
| | | | | | | | | | | INHIBITOR | |
| 143 | 1ikn | D | 95 | 296 | 2.8e−38 | | | 80.27 | NP-KAPPA-B P65 SUBUNIT; | TRANSCRIPTION FACTOR P65; PSOD; | |
| | | | | | | | | | CHAIN: A; NF-KAPPA-B P50D | TRANSCRIPTION FACTOR, IKB/NFKB | |
| | | | | | | | | | SUBUNIT; CHAIN: C; I-KAPPA- | COMPLEX | |
| | | | | | | | | | B-ALPHA; CHAIN: D; | | |
| 143 | 1myo | | 127 | 244 | 1.3e−26 | | | 72.80 | MYOTROPHIN; CHAIN: NULL | ANK-REPEAT MYOTROPHIN, | |
| | | | | | | | | | | ACETYLATION, NMR, ANK-REPEAT | |
| 143 | 1nfi | E | 87 | 292 | 5.6e−38 | | | 75.42 | NE-KAPPA-B P65; CHAIN: A, C; | COMPLEX (TRANSCRIPTION | |
| | | | | | | | | | NF-KAPPA-B P50; CHAIN: B, D; | REG/ANK REPEAT) COMPLEX | |
| | | | | | | | | | I-KAPPA-B-ALPHA; CHAIN: E, F; | (TRANSCRIPTION REGULATION/ANK | |
| | | | | | | | | | | REPEAT), ANKYRIN 2 REPEAT HELIX | |
| 146 | 1e9t | A | 220 | 269 | 1 .3e−11 | 0.15 | −1202.08 | | INTESTINAL TREFOIL FACTOR; | CELL MOTILITY FACTOR HITF; | |
| | | | | | | | | | CHAIN: A; | INTESTINAL TREFOIL FACTOR, | |
| | | | | | | | | | | SOLUTION STRUCTURE, TREFOIL 2 | |
| | | | | | | | | | | DOMAIN, NMR SPECTROSCOPY, CELL | |
| | | | | | | | | | | MOTILITY FACTOR | |
| 146 | 1hi7 | A | 222 | 275 | 7.5e−16 | 0.26 | −1202.08 | | PS2 PROTEIN; CHAIN: A, B; | GROWTH FACTOR PNR- | |
| | | | | | | | | | | 2,PS2,TFF1 ,BREAST CANCER | |
| | | | | | | | | | | ESTROGEN INDUCIBLE GROWTH | |
| | | | | | | | | | | FACTOR, CELL MOTILITY, TUMOR | |
| | | | | | | | | | | SUPPRESSOR, TREFOIL 2 DOMAIN, | |
| | | | | | | | | | | SIGNAL | |
| 146 | 2psp | A | 223 | 269 | 1.5e−11 | 0.35 | −1202.08 | | PORCINE PANCREATIC | TREFOIL FAMILY OF PEPTIDES PSP | |
| | | | | | | | | | SPASMOLYTIC POLYPEPTIDE; | REPEAT, GROWTH FACTOR, SIGNAL | |
| | | | | | | | | | CHAIN: A, B; | | |
| 152 | 1aln | A | 29 | 255 | 0 | 0.27 | −1202.08 | B*3501; CHAIN: A, B; PEPTIDE | COMPLEX (ANTIGEN/PEPTIDE) B35; | | |
| | | | | | | | | | VPLRPMTY; CHAIN: C; | MAJOR HISTOCOMPATIBILITY | |
| | | | | | | | | | | ANTIGEN, MIIC, HLA, HLA-B3501, | |
| | | | | | | | | | | HIV, 2 NEF, COMPLEX | |
| | | | | | | | | | | (ANTIGENIPEPTIDE) | |
| 152 | 1a6z | A | 22 | 227 | 1.1e−68 | | | 53.05 | HFE; CHAIN: A, C; BETA-2- | MHC CLASS I COMPLEX HFE, | |
| | | | | | | | | | MICROGLOBULIN; CHAIN: B, D | HEREDITARY HEMOCHROMATOSIS, | |
| | | | | | | | | | | MHC CLASS I | |
| 152 | 1a6z | A | 29 | 255 | 1.4e−68 | | | 59.25 | HFE; CHAIN: A, C; BETA-2- | MHC CLASS I COMPLEX HFE, | |
| | | | | | | | | | MICROGLOBULIN; CHAIN: B, D | HEREDITARY HEMOCHROMATOSIS, | |
| | | | | | | | | | | MHC CLASS I | |
| 152 | 1agd | A | 29 | 255 | 0 | 0.36 | −1202.08 | | B*0801; CHAIN: A; BETA-2 | HISTOCOMPATIBILITY COMPLEX B8; | |
| | | | | | | | | | MICROGLOBULIN; CHAIN: B; | B2M; PEPTIDE HLA B8, HIV, MHC | |
| | | | | | | | | | HIV-1 GAG PEPTIDE | CLASS I, HISTOCOMPATIBILITY | |
| | | | | | | | | | (GGKKKYKL-INDEX | COMPLEX | |
| | | | | | | | | | PEPTIDE); CHAIN: C; | | |
| 152 | 1c16 | A | 29 | 255 | 2.8e−67 | | | 50.68 | MHC-LIKE PROTEIN T22; | IMMUNE SYSTEM NON-CLASSICAL | |
| | | | | | | | | | CHAIN: A, C, E, G; BETA-2- | MHC-LIKE, MAJOR | |
| | | | | | | | | | MICROGLOBULIN; CHAIN: B, D, | HISTOCOMPATIBILITY, BETA2- 2 | |
| | | | | | | | | | F, H | MICROGLOBULIN | |
| 152 | 1d2v | C | 118 | 585 | 0 | | | 522.22 | MYELOPEROXIDASE; CHAIN: | OXIDOREDUCTASE HEME-PROTEIN, | |
| | | | | | | | | | A, B; MYELOPEROXIDASE; | PEROXIDASE, OXIDOREDUCTASE, | |
| | | | | | | | | | CHAIN: C, D; | PEROXIDASE-2 BROMIDE COMPLEX | |
| 152 | 1ed3 | A | 29 | 255 | 0 | 0.40 | −1202.08 | | CLASS I MAJOR | IMMUNE SYSTEM MAJOR | |
| | | | | | | | | | HISTOCOMPATIBILITY | HISTOCOMPATIBILITY COMPLEX, | |
| | | | | | | | | | ANTIGEN RTl-AA; CHAIN: A, D; | RAT MINOR 2 HISTOCOMPATIBILITY | |
| | | | | | | | | | BETA-2-MICROGLOBULIN; | COMPLEX, MIC, IMMUNOLOGY, | |
| | | | | | | | | | CHAIN: B, E; PEPTIDE MTF-E | PEPTIDE 3 ANTIGEN PRESENTATION, | |
| | | | | | | | | | (13N3E); CHAIN: C, F; | CELLULAR IMMUNITY, CELL | |
| | | | | | | | | | | SURFACE 4 RECEPTOR, T CELL | |
| | | | | | | | | | | RECEPTOR LIGAND | |
| 152 | 1ed3 | A | 29 | 255 | 0 | | | 58.49 | CLASS I MAJOR | IMMUNE SYSTEM MAJOR | |
| | | | | | | | | | HISTOCOMPATIBILITY | HISTOCOMPATIBILITY COMPLEX, | |
| | | | | | | | | | ANTIGEN RTl-AA; CHAIN: A, D; | RAT MINOR 2 HISTOCOMPATIBILITY | |
| | | | | | | | | | BETA-2-MICROGLOBULIN; | COMPLEX, MHC, IMMUNOLOGY, | |
| | | | | | | | | | CHAIN: B, E; PEPTIDE MTF-E | PEPTIDE 3 ANTIGEN PRESENTATION, | |
| | | | | | | | | | (13N3E); CHAIN: C, F; | CELLULAR IMMUNITY, CELL | |
| | | | | | | | | | | SURFACE 4 RECEPTOR, T CELL | |
| | | | | | | | | | | RECEPTOR LIGAND | |
| 152 | 1efx | A | 29 | 255 | 0 | 0.44 | −1020.08 | | HLA-CW3 (HEAVY CHAIN); | IMMUNE SYSTEM MHC, HLA, CLASS | |
| | | | | | | | | | CHAIN: A; BETA-2- | I, KIR, NK CELL RECEPTOR, | |
| | | | | | | | | | MICROGLOBULIN; CHAIN: B; | IMMUNOGLOBULIN 2 FOLD, | |
| | | | | | | | | | PEPTIDE FROM IMPORTIN | RECEPTOR/MHC COMPLEX | |
| | | | | | | | | | ALPHA-2; CHAIN: C; NATURAL | | |
| | | | | | | | | | KILLER CELL RECEPTOR | | |
| | | | | | | | | | KIR2DL2; CHAIN: D, E; | | |
| 152 | 1efx | A | 29 | 255 | 0 | | | 57.25 | HLA-CW3 (HEAVY CHAIN); | IMMUNE SYSTEM MHC, HLA, CLASS | |
| | | | | | | | | | CHAIN: A; BETA-2- | I, KIR, NK CELL RECEPTOR, | |
| | | | | | | | | | MICROGLOBULIN; CHAIN: B; | IMMUNOGLOBULIN 2 FOLD, | |
| | | | | | | | | | PEPTIDE FROM IMPORTIN | RECEPTOR/MHC COMPLEX | |
| | | | | | | | | | ALPHA-2; CHAIN: C; NATURAL | | |
| | | | | | | | | | KILLER CELL RECEPTOR | | |
| | | | | | | | | | KIR2DL2; CHAIN: D, E; | | |
| 152 | 1fzk | A | 29 | 255 | 5.6e−98 | | | 58.77 | H-2 CLASS I | IMMUNE SYSTEM SEV9; MAJOR | |
| | | | | | | | | | HISTOCOMPATIBILITY | HISTOCOMPATIBILITY COMPLEX | |
| | | | | | | | | | ANTIGEN, K-B CHAIN: A; | PEPTIDE-MHC | |
| | | | | | | | | | BETA-2-MICROGLOBULIN; | | |
| | | | | | | | | | CHAIN: B; NUCLEOCAPSID | | |
| | | | | | | | | | PROTEIN; CHAIN: P; | | |
| 152 | 1hoc | A | 29 | 255 | 2.8e−98 | | | 50.16 | HISTOCOMPATIBILITY | | |
| | | | | | | | | | ANTIGEN MURINE CLASS I | | |
| | | | | | | | | | MAJOR HISTOCOMPATIBILITY | | |
| | | | | | | | | | COMPLEX CONSISTING 1HOC 3 | | |
| | | | | | | | | | OF H-2D==B=, B2- | | |
| | | | | | | | | | MICROGLOBULIN, AND A9- | | |
| | | | | | | | | | RESIDUE PEPTIDE 1HOC 4 | | |
| 152 | 1hsa | A | 29 | 255 | 0 | 0.24 | −1202.08 | | HISTOCOMPATIBILITY | | |
| | | | | | | | | | ANTIGEN HUMAN CLASS I | | |
| | | | | | | | | | HISTOCOMPATIBILITY | | |
| | | | | | | | | | ANTIGEN IHSA 3 /HLA- | | |
| | | | | | | | | | B(ASTERISK)2705$ 1HSA 4 | | |
| 152 | 1hsb | A | 29 | 255 | 0 | 0.40 | −1202.08 | | HISTOCOMPATIBILITY | | |
| | | | | | | | | | ANTIGEN CLASS I | | |
| | | | | | | | | | HISTOCOMPATIBILIlIY | | |
| | | | | | | | | | ANTIGEN AW68.1 (LEUCOCYTE | | |
| | | | | | | | | | IHSB 3 ANTIGEN) 1HSB 4 | | |
| 152 | 1hsb | A | 29 | 255 | 0 | | | 52.66 | HISTOCOMPATIIBILITY | | |
| | | | | | | | | | ANTIGEN CLASS I | | |
| | | | | | | | | | HISTOCOMPATIBILITY | | |
| | | | | | | | | | ANTIGEN AW68.1 (LEUCOCYTE | | |
| | | | | | | | | | 1HSB 3 ANTIGEN) 1HSB 4 | | |
| 152 | 1hyr | C | 21 | 227 | 8.4e−55 | | | 52.26 | NKG2-D TYPE II INTEGRAL | IMMUNE SYSTEM NKG2D; MIC-A, | |
| | | | | | | | | | MEMBRANE PROTEIN; CHAIN: | MIC, PERB11; ACTIVATING NK CELL | |
| | | | | | | | | | B, A; MHC CLASS I CHAIN- | RECEPTOR, NKG2D, C-TYPE-LECTIN | |
| | | | | | | | | | RELATED PROTEIN A; CHAIN: | LIKE, MIC-2 A, MHC-I, COMPLEX, | |
| | | | | | | | | | C; | IMMUNE SYSTEM | |
| 152 | 1hyr | C | 28 | 255 | 1.4e−53 | | | 67.13 | NKG2-D TYPE II INTEGRAL | IMMUNE SYSTEM NKG2D; MIC-A, | |
| | | | | | | | | | MEMBRANE PROTEIN; CHAIN: | MIC, PERB11; ACTIVATING NK CELL | |
| | | | | | | | | | B, A; MHC CLASS I CHAIN- | RECEPTOR, NKG2D, C-TYPE-LECTIN | |
| | | | | | | | | | RELATED PROTEIN A; CHAIN: | LIKE, MIC-2 A, MHC-I, COMPLEX, | |
| | | | | | | | | | C; | IMMUNE SYSTEM | |
| 152 | 1i4f | A | 29 | 255 | 0 | 0.47 | −1202.08 | | HLA CLASS I | IMMUNE SYSTEM MAGE-4 ANTIGEN; | |
| | | | | | | | | | HISTOCOMPATIBILITY | MAJOR HISTOCOMPATIBILITY | |
| | | | | | | | | | ANTIGEN, A-2 CHAIN: A; BETA- | COMPLEX, HUMAN LEUKOCYTE | |
| | | | | | | | | | 2-MICROGLOBULIN; CHAIN: B; | ANTIGEN, 2 MELANOMA- | |
| | | | | | | | | | MELANOMA-ASSOCIATED | ASSOCIATED ANTIGEN | |
| | | | | | | | | | ANTIGEN 4; CHAIN: C; | | |
| 152 | 1i4f | A | 29 | 255 | 0 | | | 60.36 | HLA CLASS I | IMMUNE SYSTEM MAGE-4 ANTIGEN; | |
| | | | | | | | | | HISTOCOMPATIBILITY | MAJOR HISTOCOMPATIBILITY | |
| | | | | | | | | | ANTIGEN, A-2 CHAIN: A; BETA- | COMPLEX, HUMAN LEUKOCYTE | |
| | | | | | | | | | 2-MICROGLOBULIN; CHAIN: B; | ANTIGEN, 2 MELANOMA- | |
| | | | | | | | | | MELANOMA-ASSOCIATED | ASSOCIATED ANTIGEN | |
| | | | | | | | | | ANTIGEN 4; CHAIN: C; | | |
| 152 | 11d9 | A | 29 | 254 | 0 | | | 56.90 | MHC CLASS I H-2LD HEAVY | MAJOR HISTOCOMPATIBILITY | |
| | | | | | | | | | CHAIN; CHAIN: A; BETA-2 | COMPLEX LD; MAJOR | |
| | | | | | | | | | MICROGLOBULIN; CHAIN: B; | HISTOCOMPATIBILITY COMPLEX, LD | |
| | | | | | | | | | NANO-PEPTIDE; CHATN: C; | | |
| 152 | 11d9 | A | 29 | 255 | 0 | 0.20 | −1202.08 | | MHC CLASS I H-2LD HEAVY | MAJOR HISTOCOMPATIBILITY | |
| | | | | | | | | | CHAIN; CHAIN: A; BETA-2 | COMPLEX LD; MAJOR | |
| | | | | | | | | | MICROGLOBULIN; CHAIN: B; | HISTOCOMPATIBILITY COMPLEX, LD | |
| | | | | | | | | | NANO-PEPTIDE; CHAIN: C; | | |
| 152 | 1qo3 | A | 30 | 255 | 0 | 0.46 | −1202.08 | | MHC CLASS I H-2DD HEAVY | COMPLEX (NK RECEPTOR/MHC | |
| | | | | | | | | | CHAIN; CHAIN: A; BETA-2- | CLASS 1)H-2 CLASS I | |
| | | | | | | | | | MICROGLOBULIN; CHAIN: B; | HISTOCOMPATIBILITY ANTIGEN, | |
| | | | | | | | | | HIV ENVELOPE | B2M; NK-CELL SURFACE | |
| | | | | | | | | | GLYCOPROTEIN 120 PEPTIDE; | GLYCOPROTEIN YE1/48, NK CELL, | |
| | | | | | | | | | CHAIN: P; LY49A; CHAIN: C, D; | INHIBITORY RECEPTOR, MHC-I, C- | |
| | | | | | | | | | | TYPE LECTIN-LIKE, 2 | |
| | | | | | | | | | | HISTOCOMPATIBILLTY, B2M, LY49, | |
| | | | | | | | | | | LY-49 | |
| 152 | 1qo3 | A | 30 | 255 | 0 | | | 54.24 | MHC CLASS I H-2DD HEAVY | COMPLEX (NK RECEPTOR/MHC | |
| | | | | | | | | | CHAIN; CHAIN: A; BETA-2- | CLASS I) H-2 CLASS I | |
| | | | | | | | | | MICROGLOBULIN; CHAIN: B; | HISTOCOMPATIBILITY ANTIGEN, | |
| | | | | | | | | | HIV ENVELOPE | B2M; NK-CELL SURFACE | |
| | | | | | | | | | GLYCOPROTEIN 120 PEPTIDE; | GLYCOPROTEIN YE1/48, NK CELL, | |
| | | | | | | | | | CHAIN: P; LY49A; CHAIN: C, D; | INHIBITORY RECEPTOR, MHC-I, C- | |
| | | | | | | | | | | TYPE LECTIN-LIKLE, 2 | |
| | | | | | | | | | | HISTOCOMPATIBILITY, B2M, LY49, | |
| | | | | | | | | | | LY-49 | |
| 152 | 1qqd | A | 30 | 255 | 0 | 0.20 | −1202.08 | | HISTOCOMPATIBILITY | IMMUNE SYSTEM | |
| | | | | | | | | | LEUXOCYTE ANTIGEN (HLA)- | IMMUNOGLOBULIN (IG)-LIKE | |
| | | | | | | | | | CW4 CHAIN: A; BETA-2 | DOMAIN, ALPHA HELIX, BETA | |
| | | | | | | | | | MICROGLOBULIN; CHAIN: B; | SHEET, 2 IMMUNE SYSTEM | |
| | | | | | | | | | HLA-CW4 SPECIFIC PEPTIDE; | | |
| | | | | | | | | | CHAIN: C; | | |
| 152 | 1qqd | A | 30 | 255 | 0 | | | 53.86 | HISTOCOMPATIBILITY | IMMUNE SYSTEM | |
| | | | | | | | | | LEUKOCYTE ANTIGEN (HLA)- | IMMUNOGLOBULIN (IG)-LIKE | |
| | | | | | | | | | CW4 CHAIN: A; BETA-2 | DOMAIN, ALPHA HELIX, BETA | |
| | | | | | | | | | MICROGLOBULIN; CHAIN: B; | SHEET, 2 IMMUNE SYSTEM | |
| | | | | | | | | | HLA-CW4 SPECIFIC PEPTIDE; | | |
| | | | | | | | | | CHAIN: C; | | |
| 152 | 1tmc | A | 22 | 192 | 9.8e−79 | | | 68.60 | HISTOCOMPATIBILITY | | |
| | | | | | | | | | ANTIGEN TRUNCATED HUMAN | | |
| | | | | | | | | | CLASS I HISTOCOMPATIBILFIY | | |
| | | | | | | | | | ANTIGEN HLA-AW68 1TMC 3 | | |
| | | | | | | | | | COMPLEXED WITH A | | |
| | | | | | | | | | DECAMERIC PEPTIDE | | |
| | | | | | | | | | (EVAPPEYHRK) 1TMC 4 | | |
| 152 | 1zag | A | 29 | 255 | 5.6e−62 | | | 55.36 | ZINC-ALPHA-2- | LIPID MOBILIZATION FACTOR ZN- | |
| | | | | | | | | | GLYCOPROTEIN; CHAIN: A, B, | ALPHA-2-GLYCOPROTEIN, ZAG LIPID | |
| | | | | | | | | | C, D; | MOBILIZATION FACTOR, SECRETED | |
| | | | | | | | | | | MUC CLASS I HOMOLOG | |
| 154 | 1eqj | A | 71 | 336 | 4.2e−29 | 0.11 | −1202.08 | | PHOSPHOGLYCERATE | ISOMERASE ALPHAIBETA-TYPE | |
| | | | | | | | | | MUTASE; CHAIN: A; | STRUCTURE | |
| 155 | 12e8 | H | 2 | 227 | 8.4e−09 | | | 59.62 | 2E8 (IGG1=KAPPA=) | IMMUNOGLOBULIN | |
| | | | | | | | | | ANTIBODY; CHAIN: L, H, M, P; | IMMUNOGLOBULIN | |
| 155 | 1bih | A | 29 | 376 | 1.1e−29 | | | 78.69 | HEMOLIN; CHAIN: A, B; | INSECT IMMUNITY INSECT | |
| | | | | | | | | | | IMMUNITY, LPS-BINDING, | |
| | | | | | | | | | | HOMOPHILIC ADHESION | |
| 155 | 1bih | A | 30 | 346 | 1.1e−29 | 0.07 | −1202.08 | | HEMOLIN; CHAIN: A, B; | INSECT IMMUNITY INSECT | |
| | | | | | | | | | | IMMUNITY, LPS-BINDING, | |
| | | | | | | | | | | HOMOPHILIC ADHESION | |
| 155 | 1cs6 | A | 20 | 376 | 2.8e−35 | | | 85.17 | AXONIN-1; CHAIN: A; | CELL ADHESION NEURAL CELL | |
| | | | | | | | | | | ADHESION | |
| 155 | 1cvs | D | 122 | 302 | 7e−31 | 0.12 | −1202.08 | | FIBROBLAST GROWTH | GROWTH FACTOR/GROWTH FACTOR | |
| | | | | | | | | | FACTOR2; CHAIN: A, B; | RECEPTOR FGF, FGFR, | |
| | | | | | | | | | FIBROBLAST GROWTH | IMMUNOGLOBULIN-LIKE, SIGNAL | |
| | | | | | | | | | FACTOR RECEPTOR 1; CHAIN: | TRANSDUCTION, 2 DIMERIZATION, | |
| | | | | | | | | | C, D; | GROWTH FACTOR/GROWTH FACTOR | |
| | | | | | | | | | | RECEPTOR | |
| 155 | 1cvs | D | 37 | 208 | 2.8e−23 | 0.25 | −1202.08 | | FIBROBLAST GROWTH | GROWTH FACTOR/GROWTH FACTOR | |
| | | | | | | | | | FACTOR 2; CHAIN: A, B; | RECEPTOR FGF, FGFR, | |
| | | | | | | | | | FIBROBLAST GROWTH | IMMUNOGLOBULIN-LIKE, SIGNAL | |
| | | | | | | | | | FACTOR RECEPTOR 1; CHAIN: | TRANSDUCTION, 2 DIMERIZATION, | |
| | | | | | | | | | C, D; | GROWTH FACTOR/GROWTH FACTOR | |
| | | | | | | | | | | RECEPTOR | |
| 155 | 1dgi | R | 12 | 303 | 9e−22 | | | 63.55 | POLIOVIRUS RECEPTOR; | VIRUS/VIRAL PROTEIN, RECEPTOR | |
| | | | | | | | | | CHAIN: R; VP1; CHAIN: 1; VP2; | CD155, PVR, HUMAN POLIOVIRUS, | |
| | | | | | | | | | CHAIN: 2; VP3; CHAIN: 3; VP4; | ELECTRON MICROSCOPY, 2 | |
| | | | | | | | | | CHAIN: 4; | POLIOVIRUS-RECEPTOR COMPLEX, | |
| | | | | | | | | | | VIRUS/VIRAL PROTEIN, RECEPTOR | |
| 155 | 1ev2 | G | 132 | 308 | 4.2e−30 | 0.09 | −1202.08 | | FIBROBLAST GROWTH | GROWTH FACTOR/GROWTH FACTOR | |
| | | | | | | | | | FACTOR 2; CHAIN: A, B, C, D; | RECEPTOR FGF2; FGFR2; | |
| | | | | | | | | | FIBROBLAST GROWTH | IMMUNOGLOBULIN (IG)LIKE | |
| | | | | | | | | | FACTOR RECEPTOR 2; CHAIN: | DOMAINS BELONGING TO THE I-SET | |
| | | | | | | | | | E, F, G, H; | 2 SUBGROUP WITHIN IG-LIKE | |
| | | | | | | | | | | DOMAINS, B-TREFOIL FOLD | |
| 155 | levt | C | 37 | 208 | 2.8e−22 | 0.16 | −1202.08 | FIBROBLAST GROWTH | GROWTH FACTOR/GROWTH FACTOR | | |
| | | | | | | | | | FACTOR 1; CHAIN: A, B; | RECEPTOR FGF1; FGFR1; | |
| | | | | | | | | | FIBROBLAST GROWTH | IMMUNOGLOBULIN (IG) LIKE | |
| | | | | | | | | | FACTOR RECEPTOR 1; CHAIN: | DOMAINS BELONGING TO THE I-SET | |
| | | | | | | | | | C, D; | 2 SUBGROUP WITHIN IG-LIKE | |
| | | | | | | | | | | DOMAINS, B-TREFOIL FOLD | |
| 155 | 1f2q | A | 121 | 308 | 8.4e−23 | 0.18 | −1202.08 | HIGH AFFINITY | IMMUNE SYSTEM PC-EPSILON RI- | | |
| | | | | | | | | | IMMUNOGLOBULIN EPSILON | ALPHA; IMMUNOGLOBULIN FOLD, | |
| | | | | | | | | | RECEPTOR CHAIN: A; | GLYCOPROTEIN, RECEPTOR, IGE- | |
| | | | | | | | | | | BINDING 2 PROTEIN | |
| 155 | 1f2q | A | 26 | 214 | 4.2e−28 | | | 66.45 | HIGH AFFINITY | IMMUNE SYSTEM PC-EPSILON RI- | |
| | | | | | | | | | IMMUNOGLOBULIN EPSILON | ALPHA; IMMUNOGLOBULIN FOLD, | |
| | | | | | | | | | RECEPTOR CHAIN: A; | GLYCOPROTEIN, RECEPTOR, IGE- | |
| | | | | | | | | | | BINDING 2 PROTEIN | |
| 155 | 1f2q | A | 28 | 214 | 4.2e−28 | 0.23 | −1202.08 | | HIGH AFFINITY | IMMUNE SYSTEM FC-EPSILON RI- | |
| | | | | | | | | | IMMUNOGLOBULIN EPSILON | ALPHA; IMMUNOGLOBULIN FOLD, | |
| | | | | | | | | | RECEPTOR CHAIN: A; | GLYCOPROTEIN, RECEPTOR, IGE- | |
| | | | | | | | | | | BINDING 2 PROTEIN | |
| 155 | 1f42 | A | 21 | 325 | 1.2e−08 | | | 63.76 | INTERLEUKIN-12 BETA CHAIN; | CYTOKINE CYTOKINE | |
| | | | | | | | | | CHAIN: A; | | |
| 155 | 1f6a | A | 24 | 213 | 1.4e−29 | | | 75.69 | HIGH AFFINITY | IMMUNE SYSTEM HIGH AFFINITY | |
| | | | | | | | | | IMMUNOGLOBULIN EPSILON | IGE-FC RECEPTOR, FC(EPSILON) IGE- | |
| | | | | | | | | | RECEPTOR CHAIN: A; IG | FC; IMMUNOGLOBULIN FOLD, | |
| | | | | | | | | | EPSILON CHAIN C REGION; | GLYCOPROTEIN, RECEPTOR, IGE- | |
| | | | | | | | | | CHAIN: B, D; | BINDING 2 PROTEIN, 1GB ANTIBODY, | |
| | | | | | | | | | | IGE-FC | |
| 155 | 1f6a | A | 24 | 214 | 1.4e−29 | 0.42 | −1202.08 | | HIGH AFFINITY | IMMUNE SYSTEM HIGH AFFINITY | |
| | | | | | | | | | MMUNOGLOBULIN EPSILON | IGE-FC RECEPTOR, FC(EPSILON) IGE- | |
| | | | | | | | | | RECEPTOR CHAIN: A; IG | FC; IMMUNOGLOBULIN FOLD, | |
| | | | | | | | | | EPSILON CHAIN C REGION; | GLYCOPROTEIN, RECEPTOR, IGB- | |
| | | | | | | | | | CHAIN: B, D; | BINDING 2 PROTEIN, IGE ANTIBODY, | |
| | | | | | | | | | | IGE-FC | |
| 155 | 1f8t | H | 2 | 227 | 4.2e−08 | | | 66.69 | ANTIBODY FAB FRAGMENT | IMMUNE SYSTEM MONOCLONAL | |
| | | | | | | | | | (LIGHT CHAIN); CHAIN: L; | ANTIBODY, ANTIGEN-BINDING | |
| | | | | | | | | | ANTIBODY FAB FRAGMENT | FRAGMENT, INTERLEUKIN-22, X- | |
| | | | | | | | | | (HEAVY CHAIN); CHAIN: H | RAY ANALYSIS, CRYSTAL | |
| 155 | 1f97 | A | 101 | 309 | 1.4e−29 | | | 72.64 | JUNCTION ADHESION | CELL ADHESION IMMUNOGLOBULIN | |
| | | | | | | | | | MOLECULE; CHAIN: A; | SUPERFAMILY, BETA-SANDWICH | |
| | | | | | | | | | | FOLD | |
| 155 | 1fcg | A | 120 | 305 | 3e−23 | 0.14 | −1202.08 | | FC RECEPTOR | IMMUNE SYSTEM, MEMBRANE | |
| | | | | | | | | | FC(GAMMA)RIIA; CHAIN: A; | PROTEIN CD32; FC RECEPTOR, | |
| | | | | | | | | | | IMMUNOGLOULIN, LEUKOCYTE, | |
| | | | | | | | | | | CD32 | |
| 155 | 1fcg | A | 23 | 210 | 8.4e−28 | | | 78.62 | FC RECEPTOR | IMMUNE SYSTEM, MEMBRANE | |
| | | | | | | | | | FC(GAMMA)RIIA; CHAIN: A; | PROTEIN CD32; FC RECEPTOR, | |
| | | | | | | | | | | IMMUNOGLOULIN, LEUKOCYTE, | |
| | | | | | | | | | | CD32 | |
| 155 | 1fu1 | A | 117 | 307 | 1.5e−23 | 0.05 | −1202.08 | | LOW AFFINITY | IMMUNE SYSTEM RECEPTOR BETA | |
| | | | | | | | | | IMMUNOGLOBULIN GAMMA | SANDWICH, IMMUNOGLOBULIN- | |
| | | | | | | | | | FC REGION CHAIN: A; | LIKE, RECEPTOR | |
| 155 | 1fn1 | A | 22 | 211 | 7e−27 | | | 73.09 | LOW AFFINITY | IMMUNE SYSTEM RECEPTOR BETA | |
| | | | | | | | | | IMMUNOGLOBULIN GAMMA | SANDWICH, IMMUNOGLOBULIN- | |
| | | | | | | | | | FC REGION CHAIN: A; | LIKE, RECEPTOR | |
| 155 | 1ful | A | 28 | 212 | 7e−27 | 0.17 | −1202.08 | | LOW AFFINITY | IMMUNE SYSTEM RECEPTOR BETA | |
| | | | | | | | | | IMMUNOGLOBULIN GAMMA | SANDWICH, IMMUNOGLOBULIN- | |
| | | | | | | | | | FC REGION CHAIN: A; | LIKE, RECEPTOR | |
| 155 | 1g0x | A | 118 | 310 | 2.8e−22 | | | 72.43 | LEUCOCYTE | IMMUNE SYSTEM LEUKOCYTE | |
| | | | | | | | | | IMMUNOGLOBULIN-LIKE | INHIBITORY RECEPTOR-1; | |
| | | | | | | | | | RECEPTOR-1; CHAIN: A; | LEUKOCYTE IMMUNOGLOBULIN | |
| | | | | | | | | | | FOLD, 3-10 HELIX | |
| 155 | 1g0x | A | 120 | 297 | 9e−22 | 0.18 | −1202.08 | | LEUCOCYTE | IMMUNE SYSTEM LEUKOCYTE | |
| | | | | | | | | | IMMUNOGLOBULIN-LIKE | INHIBITORY RECEPTOR-1; | |
| | | | | | | | | | RECEPTOR-1; CHAIN: A; | LEUKOCYTE IMMUNOGLOBULIN | |
| | | | | | | | | | | FOLD, 3-10 HELIX | |
| 155 | 1g0x | A | 120 | 306 | 2.8e−22 | 0.21 | −1020.08 | | LEUCOCYTE | IMMUNE SYSTEM LEUKOCYTE | |
| | | | | | | | | | IMMUNOGLOBULIN-LIKE | INHIBITORY RECEPTOR-1; | |
| | | | | | | | | | RECEPTOR-1; CHAIN: A; | LEUKOCYTE IMMUNOGLOBULIN | |
| | | | | | | | | | | FOLD, 3-10 HELIX | |
| 155 | 1gOx | A | 28 | 210 | 5.6e−26 | 0.21 | −1020.08 | | LEUCOCYTE | IMMUNE SYSTEM LEUKOCYTE | |
| | | | | | | | | | IMMUNOGLOBULIN-LIKE | INHIBITORY RECEPTOR-1; | |
| | | | | | | | | | RECEPTOR-1; CHAIN: A; | LEUKOCYTE IMMUNOGLOBULIN | |
| | | | | | | | | | | FOLD, 3-10 HELIX | |
| 155 | 1igy | B | 3 | 376 | 8.4e−09 | | | 65.38 | IGG1 INTACT ANTIBODY | IMMUNOGLOBULIN INTACT | |
| | | | | | | | | | MAB61.1.3; CHAIN: A, B, C, D | IMMUNOGLOBULIN, V REGION, C | |
| | | | | | | | | | | REGION, HINGE REGION | |
| 155 | 1mco | H | 2 | 376 | 5.6e−10 | | | 74.55 | IMMUNOGLOBULIN | | |
| | | | | | | | | | IMMUNOGLOBULIN G1 (IGG1) | | |
| | | | | | | | | | (MCG) WITH A HINGE | | |
| | | | | | | | | | DELETION IMCO 3 | | |
| 155 | 1nkr | | 29 | 211 | 9.8e−26 | 0.21 | −1202.08 | | P58-CL42 KIR; CHAIN: NULL; | INHIBITORY RECEPTOR KILLER CELL | |
| | | | | | | | | | | INHIBITORY RECEPTOR; INHIBITORY | |
| | | | | | | | | | | RECEPTOR, NATURAL KILLER CELLS, | |
| | | | | | | | | | | IMMUNOLOGICAL 2 RECEPTORS, | |
| | | | | | | | | | | IMMUNOGLOBULIN FOLD | |
| 155 | 1nkr | | 31 | 211 | 5.6e−33 | | | 71.40 | P58-CL42 KIR; CHAIN: NULL; | INHIBITORY RECEPTOR KILLER CELL | |
| | | | | | | | | | | INHIBITORY RECEPTOR; INHIBITORY | |
| | | | | | | | | | | RECEPTOR, NATURAL KILLER CELLS, | |
| | | | | | | | | | | IMMUNOLOGICAL 2 RECEPTORS, | |
| | | | | | | | | | | IMMUNOGLOBULIN FOLD | |
| 155 | 2dli | A | 119 | 304 | 2.8e−32 | 0.16 | −1202.08 | | MHC CLASS INK CELL | IMMUNE SYSTEM P58 NATURAL | |
| | | | | | | | | | RECEPTOR PRECURSOR; | KILLER CELL RECEPTOR; KIR, | |
| | | | | | | | | | CHAIN: A; | NATURAL KILLER RECEPTOR, | |
| | | | | | | | | | | INHIBITORY RECEPTOR, 2 | |
| | | | | | | | | | | IMMUNOGLOBULIN | |
| 155 | 2dli | A | 216 | 331 | 9.8e−09 | 0.06 | −1202.08 | | MHC CLASS INK CELL | IMMUNE SYSTEM P58 NATURAL | |
| | | | | | | | | | RECEPTOR PRECURSOR; | KILLER CELL RECEPTOR; KIR, | |
| | | | | | | | | | CHAIN: A; | NATURAL KILLER RECEPTOR, | |
| | | | | | | | | | | INHIBITORY RECEPTOR, 2 | |
| | | | | | | | | | | IMMUNOGLOBULIN | |
| 155 | 2dli | A | 29 | 210 | 1.1e−24 | 0.43 | −1202.08 | | MHC CLASS INK CELL | IMMUNE SYSTEM P58 NATURAL | |
| | | | | | | | | | RECEPTOR PRECURSOR; | KILLER CELL RECEPTOR; KIR, | |
| | | | | | | | | | CHAIN: A; | NATURAL KILLER RECEPTOR, | |
| | | | | | | | | | | INHIBITORY RECEPTOR, 2 | |
| | | | | | | | | | | IMMUNOGLOBULIN | |
| 155 | 2dli | A | 31 | 213 | 2.8e−32 | | | 74.62 | MHC CLASS I NK CELL | IMMUNE SYSTEM P58 NATURAL | |
| | | | | | | | | | RECEPTOR PRECURSOR; | KILLER CELL RECEPTOR; KIR, | |
| | | | | | | | | | CHAIN: A; | NATURAL KILLER RECEPTOR, | |
| | | | | | | | | | | INHIBITORY RECEPTOR, 2 | |
| | | | | | | | | | | IMMUNOGLOBULIN | |
| 155 | 2fcb | A | 120 | 306 | 3e−23 | 0.14 | −1202.08 | | FC GAMMA RIIB; CHAIN: A; | IMMUNE SYSTEM CD32; RECEPTOR, | |
| | | | | | | | | | | PC, CD32, IMMUNE SYSTEM | |
| 155 | 2fcb | A | 23 | 214 | 1.4e−29 | | | 81.15 | FC GAMMA RIIB; CHAIN: A; | IMMUNE SYSTEM CD32; RECEPTOR, | |
| | | | | | | | | | | PC, CD32, IMMUNE SYSTEM | |
| 155 | 2fcb | A | 24 | 213 | 1.4e−29 | 0.12 | −1202.08 | | FC GAMMA RIIB; CHAIN: A; | IMMUNE SYSTEM CD32; RECEPTOR, | |
| | | | | | | | | | | FC, CD32, IMMUNE SYSTEM | |
| 155 | 2nmb | A | 1 | 141 | 5.6e−33 | | | 52.09 | NUMB PROTEIN; CHAIN: A; | CELL CYCLE/GENE REGULATION | |
| | | | | | | | | | GPPY PEPTIDE; CHAIN: B; | COMPLEX, SIGNAL TRANSDUCTION, | |
| | | | | | | | | | | PHOSPHOTYROSINE BINDING 2 | |
| | | | | | | | | | | DOMAIN (PTB), ASYMETR IC CELL | |
| | | | | | | | | | | DIVISION | |
| 155 | 32c2 | B | 2 | 225 | 9.8e−09 | | | 60.00 | IGG1 ANTIBODY 32C2; CHAIN: | IMMUNE SYSTEM FAB, ANTIBODY, | |
| | | | | | | | | | A; IGG1 ANTIBODY 32C2; | AROMATASE, P450 | |
| | | | | | | | | | CHAIN: B; | | |
| 156 | 1hx2 | A | 8 | 64 | 2.8e−16 | | | 54.02 | BSTI; CHAIN: A; | HYDROLASE INHIBITOR BOMBINA | |
| | | | | | | | | | | SKIN TRYPSIN INHIBITOR BETA- | |
| | | | | | | | | | | SHEET DISULFIDE-RICH | |
| 158 | 1b6c | B | 1 | 299 | 0 | | | 340.18 | FK506-BINDING PROTEIN; | COMPLEX (ISOMERASE/PROTEIN | |
| | | | | | | | | | CHAIN: A, C, E, G; TGF-B | KINASE) EKEP 12; | |
| | | | | | | | | | SUPERFAMILY RECEPTOR | SERINE/THREONINE-PROTEIN | |
| | | | | | | | | | TYPE I; CHAIN: B, D, F, H; | KINASE RECEPTOR R4; COMPLEX | |
| | | | | | | | | | | (ISOMERASE/PROTEIN KINASE), | |
| | | | | | | | | | | RECEPTOR 2 SERINE/THREONINE | |
| | | | | | | | | | | KINASE | |
| 158 | 1b6c | B | 253 | 586 | 0 | | | 351.53 | FK506-BINDING PROTEIN; | COMPLEX (ISOMERASE/PROTEIN | |
| | | | | | | | | | CHAIN: A, C, E, G; TGF-B | KINASE) FKBP12; | |
| | | | | | | | | | SUPERFAMILY RECEPTOR | SERINE/THREONINE-PROTEIN | |
| | | | | | | | | | TYPE I; CHAIN: B, D, F, H; | KINASE RECEPTOR R4; COMPLEX | |
| | | | | | | | | | | (ISOMERASE/PROTEIN KINASE), | |
| | | | | | | | | | | RECEPTOR 2 SERINE/THREONINE | |
| | | | | | | | | | | KINASE | |
| 158 | 1b6c | B | 264 | 581 | 0 | 0.64 | −1202.08 | | FK506-BINDING PROTEIN; | COMPLEX (ISOMERASE/PROTEIN | |
| | | | | | | | | | CHAIN: A, C, E, G; TGF-B | KINASE) FKBP 12; | |
| | | | | | | | | | SUPERFAMILY RECEPTOR | SERINE/THREONINE-PROTEIIN | |
| | | | | | | | | | TYPE I; CHAIN: B, D, F, I-I; | KINASE RECEPTOR R4; COMPLEX | |
| | | | | | | | | | | (ISOMERASE/PROTEIN KIN ASE), | |
| | | | | | | | | | | RECEPTOR 2 SERINE/THREONINE | |
| | | | | | | | | | | KINASE | |
| 158 | 1es7 | B | 33 | 108 | 1.4e−12 | 0.14 | −1202.08 | BONE MORPHOGENETIC | CYTOKINE BMP-2; ALK-3; PROTEIN- | | |
| | | | | | | | | | PROTEIN-2; CHAIN: A, C; BONE | PROTEIN COMPLEX, THREE FINGER | |
| | | | | | | | | | MORPHOGENETIC PROTEIN | TOXIN FOLD, RECEPTOR-2 LIGAND | |
| | | | | | | | | | RECEPTOR 1A; CHAIN: B, D; | COMPLEX, CYTOKINE RECEPTOR, | |
| | | | | | | | | | | TGF BETA SUPERFAMILY | |
| 160 | 1aln | A | 24 | 299 | 0 | | | 166.47 | B*3501; CHAIN: A, B; PEPTIDE | COMPLEX (ANTIGEN/PEPTIDE)B35; | |
| | | | | | | | | | VPLRPMTY; CHAIN: C; | MAJOR HISTOCOMPATIBLLITY | |
| | | | | | | | | | | ANTIGEN, MHC, HLA, HLA-B3501, | |
| | | | | | | | | | | HIV, 2 NEF, COMPLEX | |
| | | | | | | | | | | (ANTIGEN/PEPTIDE) | |
| 160 | 1aln | A | 26 | 298 | 0 | 0.49 | −1202.08 | | B*3501; CHAIN: A, B; PEPTIDE | COMPLEX (ANTIGEN/PEPTIDE)B35; | |
| | | | | | | | | | VPLRPMTY; CHAIN: C; | MAJOR HISTOCOMPATIBILITY | |
| | | | | | | | | | | ANTIGEN, MHC, HLA, HLA-B3501, | |
| | | | | | | | | | | HIV, 2 NEF, COMPLEX | |
| | | | | | | | | | | (ANTIGEN/PEPTIDE) | |
| 160 | 1agd | A | 24 | 299 | 0 | | | 169.42 | B*0801; CHAIN: A; BETA-2 | HISTOCOMPATIBILITY COMPLEX B8; | |
| | | | | | | | | | MICROGLOBULIN; CHAIN: B; | B2M; PEPTIDE HLA B8, HIV, MHC | |
| | | | | | | | | | HIV-1 GAG PEPTIDE | CLASS I, HISTOCOMPATIBILITY | |
| | | | | | | | | | (GGKKKYKL-INDEX | COMPLEX | |
| | | | | | | | | | PEPTIDE); CHAIN: C; | | |
| 160 | 1agd | A | 26 | 298 | 0 | 0.41 | −1202.08 | | B*0801; CHAIN: A; BETA-2 | HISTOCOMPATIBILITY COMPLEX B8; | |
| | | | | | | | | | MICROGLOBULIN; CHAIN: B; | B2M; PEPTIDE HLA B8, HIV, MHC | |
| | | | | | | | | | HIV-1 GAG PEPTIDE | CLASS I, HISTOCOMPATIBILITY | |
| | | | | | | | | | (GGKKKYKL-INDEX | COMPLEX | |
| | | | | | | | | | PEPTIDE); CHAIN: C; | | |
| 160 | 1c16 | A | 24 | 299 | 5.6e−89 | | | 139.27 | MHC-LIKE PROTEIN T22; | IMMUNE SYSTEM NON-CLASSICAL | |
| | | | | | | | | | CHAIN: A, C, E, G; BETA-2- | MHC-LIKE, MAJOR | |
| | | | | | | | | | MICROGLOBULIN; CHAIN: B, D, | HISTOCOMPATIBILITY, BETA2- 2 | |
| | | | | | | | | | F, H | MICROGLOBULIN | |
| 160 | 1ed3 | A | 24 | 300 | 0 | | | 157.88 | CLASS I MAJOR | IMMUNE SYSTEM MAJOR | |
| | | | | | | | | | HISTOCOMPATIBILITY | HISTOCOMPATIBILITY COMPLEX, | |
| | | | | | | | | | ANTIGEN RT1-AA; CHAIN: A, D; | RAT MINOR 2 HISTOCOMPATIBILITY | |
| | | | | | | | | | BETA-2MICROGLOBULIN; | COMPLEX, MHC, IMMUNOLOGY, | |
| | | | | | | | | | CHAIN: B, E; PEPTIDE MTF-E | PEPTIDE 3 ANTIGEN PRESENTATION, | |
| | | | | | | | | | (13N3E); CHAIN: C, F; | CELLULAR IMMUNITY, CELL | |
| | | | | | | | | | | SURFACE 4 RECEPTOR, T CELL | |
| | | | | | | | | | | RECEPTOR LIGAND | |
| 160 | 1ed3 | A | 26 | 298 | 0 | 0.52 | −1202.08 | | CLASS I MAJOR | IMMUNE SYSTEM MAJOR | |
| | | | | | | | | | HISTOCOMPATIBILITY | HISTOCOMPATIBILITY COMPLEX, | |
| | | | | | | | | | ANTIGEN RT1-AA; CHAIN: A, D; | RAT MINOR 2 HISTOCOMPATIBILITY | |
| | | | | | | | | | BETA-2-MICROGLOBULIN; | COMPLEX, MHC, IMMUNOLOGY, | |
| | | | | | | | | | CHAIN: B, E; PEPTIDE MTF-E | PEPTIDE 3 ANTIGEN PRESENTATION, | |
| | | | | | | | | | (13N3E); CHAIN: C, F; | CELLULAR IMMUNITY, CELL | |
| | | | | | | | | | | SURFACE 4 RECEPTOR, T CELL | |
| | | | | | | | | | | RECEPTOR LIGAND | |
| 160 | 1efx | A | 24 | 300 | 0 | | | 163.46 | HLA-CW3 (HEAVY CHAIN); | IMMUNE SYSTEM MHC, HLA, CLASS | |
| | | | | | | | | | CHAIN: A; BETA-2- | I, KIR, NK CELL RECEPTOR, | |
| | | | | | | | | | MICROGLOBULIN; CHAIN: B; | IMMUNOGLOBULIN 2 FOLD, | |
| | | | | | | | | | PEPTIDE FROM IMPORTIN | RECEPTOR/MHC COMPLEX | |
| | | | | | | | | | ALPHA-2; CHAIN: C; NATURAL | | |
| | | | | | | | | | KILLER CELL RECEPTOR | | |
| | | | | | | | | | KIR2DL2; CHAIN: D, E; | | |
| 160 | 1efx | A | 26 | 298 | 0 | 0.64 | −1202.08 | | HLA-CW3 (HEAVY CHAIN); | IMMUNE SYSTEM MHC, HLA, CLASS | |
| | | | | | | | | | CHAIN: A; BETA-2- | I, KIR, NK CELL RECEPTOR, | |
| | | | | | | | | | MICROGLOBULIN; CHAIN: B; | IMMUNOGLOBULIN 2 FOLD, | |
| | | | | | | | | | PEPTIDE FROM IMPORTIN | RECEPTOR/MHC COMPLEX | |
| | | | | | | | | | ALPHA-2; CHAIN: C; NATURAL | | |
| | | | | | | | | | KILLER CELL RECEPTOR | | |
| | | | | | | | | | KIR2DL2; CHAIN: D, E; | | |
| 160 | 1fzk | A | 24 | 296 | 0 | | | 167.88 | H-2 CLASS I | IMMUNE SYSTEM SEV9; MAJOR | |
| | | | | | | | | | HISTOCOMPATIBILITY | HISTOCOMPATIBILITY COMPLEX | |
| | | | | | | | | | ANTIGEN, K-B CHAIN: A; | PEPTIDE-MHC | |
| | | | | | | | | | BETA-2-MICROGLOBULIN. | | |
| | | | | | | | | | CHAIN: B; NUCLEOCAPSID | | |
| | | | | | | | | | PROTEIN; CHAIN: P; | | |
| 160 | 1hoc | A | 24 | 295 | 0 | | | 172.82 | HISTOCOMPATIBILITY | | |
| | | | | | | | | | ANTIGEN MURINE CLASS I | | |
| | | | | | | | | | MAJOR HISTOCOMPATIBILITY | | |
| | | | | | | | | | COMPLEX CONSISTING 1HOC 3 | | |
| | | | | | | | | | OF H-2D═B═, B2- | | |
| | | | | | | | | | MICROGLOBULIN, AND A 9- | | |
| | | | | | | | | | RESIDUE PEPTIDE 1HOC 4 | | |
| 160 | 1hsa | A | 24 | 299 | 0 | | | 167.79 | HISTOCOMPATIBILITY | | |
| | | | | | | | | | ANTIGEN HUMAN CLASS I | | |
| | | | | | | | | | HISTOCOMPATIBILITY | | |
| | | | | | | | | | ANTIGEN 1HSA 3 /HLA- | | |
| | | | | | | | | | B(ASTERISK)2705$ 1HSA 4 | | |
| 160 | 1hsa | A | 26 | 298 | 0 | 0.49 | −1202.08 | | HISTOCOMPATIBILITY | | |
| | | | | | | | | | ANTIGEN HUMAN CLASS I | | |
| | | | | | | | | | HISTOCOMPATIBILITY | | |
| | | | | | | | | | ANTIGEN 1HSA 3 /HLA- | | |
| | | | | | | | | | B ASTERISK 2705$ 1HSA 4 | | |
| 160 | 1hsb | A | 24 | 293 | 0 | | | 166.59 | HISTOCOMPATIBILITY | | |
| | | | | | | | | | ANTIGEN CLASS I | | |
| | | | | | | | | | HISTOCOMPATIBILITY | | |
| | | | | | | | | | ANTIGEN AW68.1 (LEUCOCYTE | | |
| | | | | | | | | | 1HSB 3 ANTIGEN) 1HSB 4 | | |
| 160 | 1hsb | A | 26 | 293 | 0 | 0.46 | −1202.08 | | HISTOCOMPATIBILITY | | |
| | | | | | | | | | ANTIGEN CLASS I | | |
| | | | | | | | | | HISTOCOMPATIBILITY | | |
| | | | | | | | | | ANTIGEN AW68.1 (LEUCOCYTE | | |
| | | | | | | | | | 1HSB 3 ANTIGEN) 1HSB 4 | | |
| 160 | 1hyr | C | 10 | 193 | 2.8e−53 | | | 236.94 | NKG2-D TYPE II INTEGRAL | IMMUNE SYSTEM NKG2D; MIC-A, | |
| | | | | | | | | | MEMBRANE PROTEIN; CHAIN: | MIC, PERB11; ACTIVATING NK CELL | |
| | | | | | | | | | B, A; MHC CLASS I CHAIN- | RECEPTOR, NKG2D, C-TYPE-LECTIN | |
| | | | | | | | | | RELATED PROTEIN A; CHAIN: | LIKE, MIC-2 A, MHC-I, COMPLEX, | |
| | | | | | | | | | C; | IMMUNE SYSTEM | |
| 160 | 1hyr | C | 23 | 297 | 6e−93 | | | 439.85 | NKG2-D TYPE II INTEGRAL | IMMUNE SYSTEM NKG2D; MIC-A, | |
| | | | | | | | | | MEMBRANE PROTEIN; CHAIN: | MIC, PERB11; ACTIVATING NK CELL | |
| | | | | | | | | | B, A; MHC CLASS I CHAIN- | RECEPTOR, NKG2D, C-TYPE-LECTIN | |
| | | | | | | | | | RELATED PROTEIN A; CHAIN: | LIKE, MIC-2A, MHC-I, COMPLEX, | |
| | | | | | | | | | C; | IMMUNE SYSTEM | |
| 160 | 1i4f | A | 24 | 298 | 0 | | | 168.36 | HLA CLASS I | IMMUNE SYSTEM MAGE-4 ANTIGEN; | |
| | | | | | | | | | HISTOCOMPATIBILITY | MAJOR HISTOCOMPATIBILITY | |
| | | | | | | | | | ANTIGEN, A-2 CHAIN: A; BETA- | COMPLEX, HUMAN LEUKOCYTE | |
| | | | | | | | | | 2-MICROGLOBULIN; CHAIN: B; | ANTIGEN, 2 MELANOMA- | |
| | | | | | | | | | MELANOMA-ASSOCIATED | ASSOCIATED ANTIGEN | |
| | | | | | | | | | ANTIGEN 4; CHAIN: C; | | |
| 160 | 1i4f | A | 26 | 298 | 0 | 0.49 | −1202.08 | | HLA CLASS I | IMMUNE SYSTEM MAGE-4 ANTIGEN; | |
| | | | | | | | | | HISTOCOMPATIBILITY | MAJOR HISTOCOMPATIBILITY | |
| | | | | | | | | | ANTIGEN, A-2 CHAIN: A; BETA- | COMPLEX, HUMAN LEUKOCYTE | |
| | | | | | | | | | 2-MICROGLOBULIN; CHAIN: B; | ANTIGEN, 2 MELANOMA- | |
| | | | | | | | | | MELANOMA-ASSOCIATED | ASSOCIATED ANTIGEN | |
| | | | | | | | | | ANTIGEN 4; CHAIN: C; | | |
| 160 | 11d9 | A | 24 | 291 | 0 | | | 166.41 | MHC CLASS I H-2LD HEAVY | MAJOR HISTOCOMPATIBILITY | |
| | | | | | | | | | CHAIN; CHAIN: A; BETA-2 | COMPLEX LD; MAJOR | |
| | | | | | | | | | MICROGLOBULIN; CHAIN: B; | HISTOCOMPATIBILITY COMPLEX, LD | |
| | | | | | | | | | NANO-PEPTIDE; CHAIN: C; | | |
| 160 | 1mhc | A | 24 | 299 | 0 | | | 156.53 | MHC CLASS I ANTIGEN H2-M3; | HISTOCOMPATIBILITY | |
| | | | | | | | | | 1MHC 6 CHAIN: A, B, D, E; | ANTIGEN/PEPTIDE MAJOR | |
| | | | | | | | | | 1MHC 7 NONAPEPTIDE FROM | HISTOCOMPATIBILITY COMPLEX; | |
| | | | | | | | | | RAT NADH DEHYDROGENASE; | 1MHC 8 ND1; 1MHC 15 | |
| | | | | | | | | | 1MHC 12 CHAIN: C, F; 1MHC 13 | | |
| 160 | 1mhe | A | 25 | 296 | 0 | | | 170.11 | HLA CLASS I | MAJOR HISTOCOMPATIBILITY | |
| | | | | | | | | | HISTOCOMPATIBILITY | COMPLEX MHC NONCLASSICAL | |
| | | | | | | | | | ANTIGEN HLA-E; CHAIN: A, C; | CHAIN, MHC-E, HLA-E, MHC CLASS | |
| | | | | | | | | | BETA-2-MICROGLOBULIN; | HLA-E, HLAE, MAJOR | |
| | | | | | | | | | CHAIN: B, D; PEPTIDE | HISTOCOMPATIBILITY COMPLEX, | |
| | | | | | | | | | (VMAPRTVLL); CHAIN: P, Q; | MHC, HLA, 2 BETA 2 | |
| | | | | | | | | | | MICROGLOBULIN, PEPTIDE, LEADER | |
| | | | | | | | | | | PEPTIDE, 3 NON-CLASSICAL MHC, | |
| | | | | | | | | | | CLASS LB MHC | |
| 160 | 1mhe | A | 26 | 297 | 0 | 0.53 | −1202.08 | | HLA CLASS I | MAJOR HISTOCOMPATIBILITY | |
| | | | | | | | | | HISTOCOMPATIBILITY | COMPLEX MHC NONCLASSICAL | |
| | | | | | | | | | ANTIGEN LILA-B; CHAIN: A, C; | CHAIN, MHC-E, HLA-E, MHC CLASS | |
| | | | | | | | | | BETA-2-MICROGLOBULIN; | HLA-E, HLA E, MAJOR | |
| | | | | | | | | | CHAIN: B, D; PEPTIDE | HISTOCOMPATIBILITY COMPLEX, | |
| | | | | | | | | | (VMAPRTVLL); CHAIN: P, Q; | MHC, HLA, 2 BETA 2 | |
| | | | | | | | | | | MICROGLOBULIN, PEPTIDE, LEADER | |
| | | | | | | | | | | PEPTIDE, 3 NON-CLASSICAL MHC, | |
| | | | | | | | | | | CLASS IB MHC | |
| 160 | 1qo3 | A | 25 | 298 | 0 | | | 177.20 | MHC CLASS I H-2DD HEAVY | COMPLEX (NK RECEPTOR/MHC | |
| | | | | | | | | | CHAIN; CHAIN: A; BETA-2- | CLASS I) H-2 CLASS I | |
| | | | | | | | | | MICROGLOBULIN; CHAIN: B; | HISTOCOMPATIBILITY ANTIGEN, | |
| | | | | | | | | | HIV ENVELOPE | B2M; NK-CELL SURFACE | |
| | | | | | | | | | GLYCOPROTEIN 120 PEPTIDE; | GLYCOPROTEIN YE1/48, NK CELL, | |
| | | | | | | | | | CHAIN: P; LY49A; CHAIN: C, D; | INHIBITORY RECEPTOR, MHC-I, C- | |
| | | | | | | | | | | TYPE LECTIN-LIKE, 2 | |
| | | | | | | | | | | HISTOCOMPATIBILITY, B2M, LY49, | |
| | | | | | | | | | | LY-49 | |
| 160 | 1qo3 | A | 26 | 298 | 0 | 0.42 | −1202.08 | | MHC CLASS I H-2DD HEAVY | COMPLEX (NK RECEPTOR/MHC | |
| | | | | | | | | | CHAIN; CHAIN: A; BETA-2- | CLASS I) H-2 CLASS I | |
| | | | | | | | | | MICROGLOBULIN; CHAIN: B; | HISTOCOMPATIBILITY ANTIGEN, | |
| | | | | | | | | | HIV ENVELOPE | B2M; NK-CELL SURFACE | |
| | | | | | | | | | GLYCOPROTEIN 120 PEPTIDE; | GLYCOPROTEIN YE1/48, NK CELL, | |
| | | | | | | | | | CHAIN: P; LY49A; CHAIN: C, D; | INHIBITORY RECEPTOR, MHC-I, C- | |
| | | | | | | | | | | TYPE LECTIIN-LIKE, 2 | |
| | | | | | | | | | | HISTOCOMPATIBILITY, B2M, LY49, | |
| | | | | | | | | | | LY-49 | |
| 160 | 1qqd | A | 25 | 296 | 0 | | | 173.19 | HISTOCOMPATIBILITY | IMMUNE SYSTEM | |
| | | | | | | | | | LEUKOCYTE ANTIGEN (HLA)- | IMMUNOGLOBULIN (IG)-LIKE | |
| | | | | | | | | | CW4 CHAIN: A; BETA-2 | DOMAIN, ALPHA HELIX, BETA | |
| | | | | | | | | | MICROGLOBULIN; CHAIN: B; | SHEET, 2 IMMUNE SYSTEM | |
| | | | | | | | | | HLA-CW4 SPECIFIC PEPTIDE; | | |
| | | | | | | | | | CHAIN: C; | | |
| 160 | 1qqd | A | 26 | 297 | 0 | 0.43 | −1202.08 | | HISTOCOMPATIBILITY | IMMUNE SYSTEM | |
| | | | | | | | | | LEUKOCYTE ANTIGEN (HLA)- | IMMUNOGLOBULIN (IG)-LIKE | |
| | | | | | | | | | CW4 CHAIN: A; BETA-2 | DOMAIN, ALPHA HELIX, BETA | |
| | | | | | | | | | MICROGLOBULIN; CHAIN: B; | SHEET, 2 IMMUNE SYSTEM | |
| | | | | | | | | | HLA-CW4 SPECIFIC PEPTIDE; | | |
| | | | | | | | | | CHAIN: C; | | |
| 160 | 1tmc | A | 11 | 185 | 8.4e−80 | | | 83.62 | HISTOCOMPATIBILITY | | |
| | | | | | | | | | ANTIGEN TRUNCATED HUMAN | | |
| | | | | | | | | | CLASS I HISTOCOMPATIBILITY | | |
| | | | | | | | | | ANTIGEN HLA-AW68 1TMC 3 | | |
| | | | | | | | | | COMPLEXED WITH A | | |
| | | | | | | | | | DECAMERIC PEPTIDE | | |
| | | | | | | | | | (EYAPPEYHRK) 1TMC 4 | | |
| 160 | 2fb4 | H | 212 | 305 | 1.1e−07 | 0.84 | −1202.08 | | IMMUNOGLOBULIN | | |
| | | | | | | | | | IMMUNOGLOBULIN FAB 2FB4 | | |
| | | | | | | | | | 4 | | |
| 160 | 2fgw | H | 186 | 305 | 4.2e−08 | 0.18 | −1202.08 | IMMUNOGLOBULIN FAB | | | |
| | | | | | | | | | FRAGMENT OF A HUMANIZED | | |
| | | | | | | | | | VERSION OF THE ANTI-CD 18 | | |
| | | | | | | | | | 2FGW 3 ANTIBODY ‘H52’ | | |
| | | | | | | | | | (HUH52-OZ FAB) 2FGW 4 | | |
| 176 | 1aox | A | 356 | 548 | 4.2e−32 | 0.32 | 0.96 | | INTEGRIN ALPHA 2 BETA; | INTEGRIN INTEGRIN, CELL | |
| | | | | | | | | | CHAIN: A, B; | ADHESION, GLYCOPROTEIN | |
| 176 | 1atz | A | 358 | 516 | 4.2e−12 | 0.23 | 0.81 | | VON WILLEBRAND FACTOR; | COLLAGEN-BINDING COLLAGEN- | |
| | | | | | | | | | CHAIN: A, B; | BINDING, HEMOSTASIS, | |
| | | | | | | | | | | DINUCLEOTIDE BINDING FOLD | |
| 176 | 1auq | | 345 | 552 | 4.2e−54 | 0.16 | 0.16 | | A1 DOMAIN OF VON | WILLEBRAND WILLEBRAND, BLOOD | |
| | | | | | | | | | WILLEBRAND FACTOR; CHAIN: | COAGULATION, PLATELET, | |
| | | | | | | | | | NULL; | GLYCOPROTEIN | |
| 176 | 1ck4 | A | 361 | 545 | 1.4e−31 | 0.37 | 0.42 | | INTEGRIN ALPHA-1; CHAIN: A, | STRUCTURAL PROTEIN I-DOMAIN, | |
| | | | | | | | | | B; | METAL BINDING, COLLAGEN, | |
| | | | | | | | | | | ADHESION | |
| 176 | 1dzi | A | 358 | 534 | 3.4e−14 | 0.10 | 0.55 | | INTEGRIN; CHAIN: A; | INTEGRIN INTEGRIN, COLLAGEN | |
| | | | | | | | | | COLLAGEN; CHAIN: B, C, D; | | |
| 176 | 1dzi | A | 361 | 534 | 1.4e−28 | 0.23 | 1.00 | | INTEGRIN; CHAIN: A; | INTEGRIN INTEGRIN, COLLAGEN | |
| | | | | | | | | | COLLAGEN; CHAIN: B, C, D; | | |
| 176 | 1fns | A | 355 | 549 | 7e−51 | 0.29 | 0.49 | | IMMUNOGLOBULIN NMC-4 | IMMUNE SYSTEM VON WILLEBRAND | |
| | | | | | | | | | IGG1; CHAIN: L; | FACTOR, GLYCOPROTEIN IBA | |
| | | | | | | | | | IMMUNOGLOBULIN NMC-4 | (A:ALPHA) BINDING, 2 COMPLEX | |
| | | | | | | | | | IGG1; CHAIN: H; VON | (WILLEBRAND/IMMUNOGLOBULIN), | |
| | | | | | | | | | WILLEBRAND FACTOR; CHAIN: | BLOOD COAGULATION TYPE 3 2B | |
| | | | | | | | | | A; | VON WILLEBRAND DISEASE | |
| 176 | 1ido | | 361 | 542 | 4.2e−35 | 0.13 | 0.48 | | INTEGRIN; CHAIN: NULL; | CELL ADHESION PROTEIN A-DOMAIN | |
| | | | | | | | | | | INTEGRIN, CELL ADHESION | |
| | | | | | | | | | | PROTEIN, GLYCOPROTEIN, | |
| | | | | | | | | | | EXTRACELLULAR 2 MATRIX, | |
| | | | | | | | | | | CYTOSKELETON | |
| 176 | 1lfa | A | 361 | 547 | 7e−32 | −0.04 | 0.46 | | CD11A; 1LFA 5 CHAIN: A, B; | CELL ADHESION LFA-1, ALPHA- | |
| | | | | | | | | | 1LFA 6 | L\, BETA-2 INTEGRIN, A-DOMAIN; | |
| | | | | | | | | | | 1LFA 8 | |
| 176 | 1qc5 | A | 361 | 543 | 5.6e−30 | 0.33 | 0.77 | | ALPHA1 BETA1 INTEGRIN; | CELL ADHESION INTEGRIN, CELL | |
| | | | | | | | | | CHAIN: A; ALPHAI BETA1 | ADHESION | |
| | | | | | | | | | INTEGRIN; CHAIN: B; | | |
| 177 | 1ciu | | 6 | 675 | 1.4e−77 | | | 82.96 | CYCLODEXTRIN | GLYCOSIDASE CGTASE; 1CIU 8 | |
| | | | | | | | | | GLYCOSYLTRANSFERASE; | THERMOSTABLE 1CIU 14 | |
| | | | | | | | | | 1CIU 6 CHAIN: NULL; 1CIU 7 | | |
| 177 | 1e43 | A | 9 | 484 | 9.8e−17 | | | 79.59 | ALPHA-AMYLASE; CHAIN: A; | HYDROLASE HYDROLASE, | |
| | | | | | | | | | | AMYLASE, FAMILY 13 | |
| 177 | 1gcy | A | 1 | 397 | 5.6e−18 | | | 74.07 | GLUCAN 1,4-ALPHA- | HYDROLASE BETA-ALPHA-BARREL, | |
| | | | | | | | | | MALTOTETRAHYDROLASE; | BETA SHEET | |
| | | | | | | | | | CHAIN: A; | | |
| 177 | 1hx0 | A | 5 | 488 | 5.6e−43 | | | 66.82 | ALPHA AMYLASE (PPA); | HYDROLASE ALPHA-AMYLASE, | |
| | | | | | | | | | CHAIN: A; | INHIBITOR, CARBOHYDRATE, | |
| | | | | | | | | | | PANCREAS | |
| 177 | 1qho | A | 12 | 671 | 4.2e−70 | | | 81.19 | ALPHA-AMYLASE; CHAIN: A; | HYDROLASE “MALTOGENIC” ALPHA | |
| | | | | | | | | | | AMYLASE; AMYLASE, GLYCOSIDE | |
| | | | | | | | | | | HYDROLASE, STARCH | |
| | | | | | | | | | | DEGRADATION | |
| 177 | 1uok | | 110 | 675 | 0 | | | 90.36 | OLIGO-1,6-GLUCOSIDASE; | GLUCOSIDASE GLUCOSIDASE, | |
| | | | | | | | | | CHAIN: NULL; | SUGAR DEGRADATION, HIYDROLASE, | |
| | | | | | | | | | | TIM-BARREL 2 GLYCOSIDASE, | |
| | | | | | | | | | | HYDROLASE | |
| 177 | 1uok | | 7 | 543 | 0 | | | 74.70 | OLIGO-1,6-GLUCOSIDASE; | GLUCOSIDASE GLUCOSIDASE, | |
| | | | | | | | | | CHAIN: NULL; | SUGAR DEGRADATION, HYDROLASE, | |
| | | | | | | | | | | TIM-BARREL 2 GLYCOSIDASE, | |
| | | | | | | | | | | HYDROLASE | |
| 179 | 1aab | | 675 | 754 | 1.4e−17 | 0.90 | 1.00 | | HIGH MOBILITY GROUP | DNA-BINDING HMGA DNA-BINDING | |
| | | | | | | | | | PROTEIN; 1AAB 5 CHAIN: | HMG-BOX DOMAIN A OF RAT HMG1; | |
| | | | | | | | | | NULL; 1AAB 6 | 1AAB 8 HMG-BOX 1AAB 20 | |
| 179 | 1aab | | 676 | 754 | 1.7e−23 | 0.83 | 1.00 | | HIGH MOBILITY GROUP | DNA-BINDING HMGA DNA-BINDING | |
| | | | | | | | | | PROTEIN; 1AAB 5 CHAIN: | HMG-BOX DOMAIN A OF RAT HMG1; | |
| | | | | | | | | | NULL; 1AAB 6 | 1AAB 8 HMG-BOX 1AAB 20 | |
| 179 | 1cg7 | A | 669 | 751 | 4.2e−25 | 0.51 | 1.00 | | NON HISTONE PROTEIN 6 A; | DNA BINDING PROTEIN HMG BOX, | |
| | | | | | | | | | CHAIN: A; | DNA BENDING, DNA RECOGNITION, | |
| | | | | | | | | | | CHROMATIN, NMR, DNA 2 BINDING | |
| | | | | | | | | | | PROTEIN | |
| 179 | 1ckt | A | 680 | 748 | 1.4e−14 | 0.29 | 1.00 | | HIGH MOBILITY GROUP 1 | GENE REGULATION/DNA HMG-1, | |
| | | | | | | | | | PROTEIN; CHAIN: A; DNA (5′- | AMPHOTERIN, HEPARIN-BINDING | |
| | | | | | | | | | D(*CP*CP*(IDO) CHAIN: B; DNA | PROTEIN P30; HIGH-MOBILITY | |
| | | | | | | | | | (5′-CHAIN: C; | GROUP DOMAIN, BENT DNA, | |
| | | | | | | | | | | PROTEIN-DRUG-DNA 2 COMPLEX, | |
| | | | | | | | | | | GENE REGULATION/DNA | |
| 179 | 1ckt | A | 681 | 748 | 3.4e−20 | 0.47 | 1.00 | | HIGH MOBILITY GROUP 1 | GENE REGULATION/DNA HMG-1, | |
| | | | | | | | | | PROTEIN; CHAIN: A; DNA (5′- | AMPHOTERIN, HEPARIN-BINDING | |
| | | | | | | | | | D(*CP*CP*(IDO) CHAIN: B; DNA | PROTEIN P30; HIGH-MOBILITY | |
| | | | | | | | | | (5′-CHAIN: C; | GROUP DOMAIN, BENT DNA, | |
| | | | | | | | | | | PROTEIN-DRUG-DNA 2 COMPLEX, | |
| | | | | | | | | | | GENE REGULATION/DNA | |
| 179 | 1hme | | 676 | 751 | 5.6e−29 | 0.50 | 1.00 | | DNA-BINDING HIGH MOBILITY | | |
| | | | | | | | | | GROUP PROTEIN FRAGMENT-B | | |
| | | | | | | | | | (HMGB) (DNA-BINDING 1HME 3 | | |
| | | | | | | | | | HMG-BOX DOMAIN B OF RAT | | |
| | | | | | | | | | HMG1) (NMR, 1 STRUCTURE) | | |
| | | | | | | | | | 1HME4 | | |
| 179 | 1hsm | | 679 | 752 | 2.8e−27 | 0.68 | 1.00 | | DNA-BINDING HIGH MOBILITY | | |
| | | | | | | | | | GROUP PROTEIN 1 (HMG1) BOX | | |
| | | | | | | | | | 2, COMPLEXED WITH 1HSM 3 | | |
| | | | | | | | | | MERCAPTOETHANOL (NMR, | | |
| | | | | | | | | | MINIMIZED AVERAGE | | |
| | | | | | | | | | STRUCTURE) 1HSM 4 | | |
| 179 | 1qrv | A | 678 | 752 | 1.4e−17 | 0.65 | 1.00 | | DNA 5′- | GENE REGULATION/DNA HMG-D; | |
| | | | | | | | | | D(*GP*CP*GP*AP*TP*AP*TP*C | PROTEIN-DNA COMPLEX, HMG | |
| | | | | | | | | | P*GP*C)-3~); CHAIN: C, D; HIGH | DOMAIN, NON-SEQUENCE SPECIFIC 2 | |
| | | | | | | | | | MOBILITY GROUP PROTEIN D; | CHROMOSOMAL PROTEIN HMG-D | |
| | | | | | | | | | CHAIN: A, B; | | |
| 180 | 1d5s | B | 342 | 382 | 5.6e−13 | | | 61.26 | P1-ARG ANTIThYPSIN; CHAIN: | HYDROLASE INHIBITOR SERPIN | |
| | | | | | | | | | A; P1-ARG ANTITRYPSIN; | FOLD, RCL CLEAVAGE, A BETA | |
| | | | | | | | | | CHAIN: B; | SHEET POLYMERISATION | |
| 180 | 1d5s | B | 646 | 686 | 1.2e−14 | −0.81 | 0.75 | | P1-ARG ANTITRYPSIN; CHAIN: | HYDROLASE INHIBITOR SERPIN | |
| | | | | | | | | | A; P1-ARG ANTITRYPSIN; | FOLD, RCL CLEAVAGE, A BETA | |
| | | | | | | | | | CHAIN: B; | SHEET POLYMERISATION | |
| 180 | 1d5s | B | 646 | 686 | 9.8e−13 | −0.81 | 0.75 | | P1-ARG ANTITRYPSIN; CHAIN: | HYDROLASE INHIBITOR SERPIN | |
| | | | | | | | | | A; PI-ARG ANTITRYPSIN; | FOLD, RCL CLEAVAGE, A BETA | |
| | | | | | | | | | CHAIN: B; | SHEET POLYMERISATION | |
| 180 | 1ezx | A | 12 | 346 | 0 | | | 370.31 | ALPHA-1-ANTITRYPSIN; | HYDROLASE/HYDROLASE INHIBITOR | |
| | | | | | | | | | CHAIN: A; ALPHA-1- | PROTEASE-INHIBITOR COMPLEX, | |
| | | | | | | | | | ANTITRYPSIN; CHAIN: B; | SERPIN, ALPHA-1-ANTITRYPSIN, 2 | |
| | | | | | | | | | TRYPSIN; CHAIN: C; | TRYPSIN | |
| 180 | 1ezx | A | 316 | 650 | 0 | | | 366.89 | ALPHA-1-ANTITRYPSIN; | HYDROLASE/HYDROLASE INHIBITOR | |
| | | | | | | | | | CHAIN: A; ALPHA-1- | PROTEASE-INHIBITOR COMPLEX, | |
| | | | | | | | | | ANTITRYPSIN; CHAIN: B; | SERPIN, ALPHA-1-ANTITRYPSIN, 2 | |
| | | | | | | | | | TRYPSIN; CHAIN: C; | TRYPSIN | |
| 180 | 1ezx | A | 317 | 650 | 0 | 0.69 | 1.00 | | ALPHA-1-ANTITRYPSIN; | HYDROLASE/HYDROLASE INHIBITOR | |
| | | | | | | | | | CHAIN: A; ALPHA-1- | PROTEASE-INHIBITOR COMPLEX, | |
| | | | | | | | | | ANTITRYPSIN; CHAIN: B; | SERPIN, ALPHA-1-ANTITRYPSIN, 2 | |
| | | | | | | | | | TRYPSIN; CHAIN: C; | TRYPSIN | |
| 180 | 1ezx | B | 651 | 686 | 1.1e−11 | −0.78 | 0.30 | | ALPHA-1-ANTITRYPSIN; | HYDROLASE/HYDROLASE INHIBITOR | |
| | | | | | | | | | CHAIN: A; ALPHA-1- | PROTEASE-INHIBITOR COMPLEX, | |
| | | | | | | | | | ANTITRYPSIN; CHAIN: B; | SERPIN, ALPHA-1-ANTITRYPSIN, 2 | |
| | | | | | | | | | TRYPSIN; CHAIN: C; | TRYPSIN | |
| 180 | 1ezx | B | 651 | 686 | 3.4e−12 | −0.78 | 0.30 | | ALPHA-1-ANTITRYPSIN; | HYDROLASE/HYDROLASE INHIBITOR | |
| | | | | | | | | | CHAIN: A; ALPHA-1- | PROTEASE-INHIBITOR COMPLEX, | |
| | | | | | | | | | ANTITRYPSIN; CHAIN: B; | SERPIN, ALPHA-1-ANTITRYPSIN, 2 | |
| | | | | | | | | | TRYPSIN; CHAIN: C; | TRYPSIN | |
| 180 | 1qlp | A | 11 | 382 | 0 | | | 424.42 | ALPHA-1-ANTITRYPSIN; | SERINE PROTEASE INHIBITOR | |
| | | | | | | | | | CHAIN: A; | ALPHA-1-PROTEINASE INHIBITOR, | |
| | | | | | | | | | | ALPHA-1-ANTIPROTEINASE; SERINE | |
| | | | | | | | | | | PROTEASE INHIBITOR, SERPIN, | |
| | | | | | | | | | | GLYCOPROTEIN, SIGNAL, 2 | |
| | | | | | | | | | | POLYMORPHISM, EMPHYSEMA, | |
| | | | | | | | | | | DISEASE MUTATION, ACUTE PHASE | |
| 180 | 1glp | A | 315 | 686 | 0 | | | 424.95 | ALPHA-1-ANTITRYPSTN; | SERINE PROTEASE INHIBITOR | |
| | | | | | | | | | CHAIN: A; | ALPHA-1-PROTEINASB INHIBITOR, | |
| | | | | | | | | | | ALPHA-1-ANTIPROTEINASE; SERINE | |
| | | | | | | | | | | PROTEASE INHIBITOR, SERPIN, | |
| | | | | | | | | | | GLYCOPROTEIN, SIGNAL, 2 | |
| | | | | | | | | | | POLYMORPHISM, EMPHYSEMA, | |
| | | | | | | | | | | DISEASE MUTATION, ACUTE PHASE | |
| 180 | 1qlp | A | 317 | 686 | 0 | 0.82 | 1.00 | | ALPHA-1-ANTITRYPSIN; | SERINE PROTEASE INHIBITOR | |
| | | | | | | | | | CHAIN: A; | ALPHA-1-PROTEINASE INHIBITOR, | |
| | | | | | | | | | | ALPHA-1-ANTIPROTEINASE; SERINE | |
| | | | | | | | | | | PROTEASE INHIBITOR, SERPIN, | |
| | | | | | | | | | | GLYCOPROTEIN, SIGNAL, 2 | |
| | | | | | | | | | | POLYMORPHISM, EMPHYSEMA, | |
| | | | | | | | | | | DISEASE MUTATION, ACUTE PHASE | |
| 180 | 1qmb | B | 341 | 382 | 1.4e−12 | | | 61.02 | ALPHA-1-ANTITRYPSIN; | SERINE PROTEASE INHIBITOR | |
| | | | | | | | | | CHAIN: A, B; | ALPHA-1-PROTEINASE INHIBITOR, | |
| | | | | | | | | | | ALPHA-1-PI; SERPIN, ANTITRYPSIN, | |
| | | | | | | | | | | POLYMER, CLEAVED | |
| 180 | 1qmb | B | 645 | 686 | 2.8e−12 | −0.81 | 0.90 | | ALPHA-1-ANTITRYPSIN; | SERINE PROTEASE INHIBITOR | |
| | | | | | | | | | CHAIN: A, B; | ALPHA-1-PROTEINASE INHIBITOR, | |
| | | | | | | | | | | ALPHA-1-PI; SERPIN, ANTITRYPSIN, | |
| | | | | | | | | | | POLYMER, CLEAVED | |
| 180 | 1qmb | B | 645 | 686 | 5.1e−14 | −0.81 | 0.90 | | ALPHA-1-ANTITRYPSIN; | SERINE PROTEASE INHIBITOR | |
| | | | | | | | | | CHAIN: A, B; | ALPHA-1-PROTEINASE INHIBITOR, | |
| | | | | | | | | | | ALPHA-1-PI; SERPIN, ANTITRYPSIN, | |
| | | | | | | | | | | POLYMER, CLEAVED | |
| 181 | 1a0j | A | 330 | 536 | 1.4e−69 | 0.19 | 0.65 | | TRYPSIN; CHAIN: A, B, C, D; | SERINE PROTEASE SERINE | |
| | | | | | | | | | | PROTEINASE, TRYPSIN, HYDROLASE | |
| 181 | 1a01 | A | 330 | 530 | 1.4e−67 | 0.07 | 0.76 | | BETA-TRYPTASE; CHAIN: A, B, | SERINE PROTELNASE TRYPSIN-LIKE | |
| | | | | | | | | | C, D; | SERINE PROTEINASE, TETRAMER, | |
| | | | | | | | | | | HEPARIN, ALLERGY, 2 ASTHMA | |
| 181 | 1bru | P | 330 | 536 | 2.8e−69 | 0.21 | 0.49 | | ELASTASE; CHAIN: P; | SERINE PROTEASE PPE; SERINE | |
| | | | | | | | | | | PROTEASE, HYDROLASE | |
| 181 | 1ddj | A | 328 | 536 | 7e−70 | 0.32 | 0.93 | | PLASMINOGEN; CHAIN: A, B, C, | BLOOD CLOTTING PLASMINOGEN, | |
| | | | | | | | | | D; | CATALYTIC DOMAIN | |
| 181 | 1dle | A | 339 | 430 | 2.8e−17 | 0.39 | −0.09 | | COMPLEMENT FACTOR B; | HYDROLASE SERINE PROTEASE, | |
| | | | | | | | | | CHAIN: A, B; | COMPLEMENT SYSTEM, FACTOR B, | |
| | | | | | | | | | | PROTEIN-2 PROTEIN INTERACTION, | |
| | | | | | | | | | | ACTIVATION MECHANISM, BETA- | |
| | | | | | | | | | | BARREL FOLD, | |
| 181 | 1dle | A | 476 | 534 | 1.3e−07 | −0.21 | 0.21 | | COMPLEMENT FACTOR B; | HYDROLASE SERINEPROTEASE, | |
| | | | | | | | | | CHAIN: A, B; | COMPLEMENT SYSTEM, FACTOR B, | |
| | | | | | | | | | | PROTEIN-2PROTEIN INTERACTION, | |
| | | | | | | | | | | ACTIVATION MECHANISM, BETA- | |
| | | | | | | | | | | BARREL FOLD, | |
| 181 | 1elv | A | 352 | 497 | 0.0034 | 0.17 | 0.89 | | COMPLEMENT C1S | HYDROLASETRYPSIN-LIKE SERIN | |
| | | | | | | | | | COMPONENT; CHAIN: A; | PROTEASE, CCP (OR SUSHI OR | |
| | | | | | | | | | | SCR)MODULE | |
| 181 | 1f7z | A | 330 | 536 | 1.4e−67 | 0.34 | 0.95 | | TRYPSIN II, ANIONIC; CHAIN: | HYDROLASE/HYDROLASE INHIBITOR | |
| | | | | | | | | | A; PANCREATIC TRYPSIN | BPTISERINE PROTEASE, TRYPSIN | |
| | | | | | | | | | INHIBITOR; CHAIN: I; | PRECURSOR | |
| 181 | 1fn8 | A | 331 | 497 | 0.0017 | 0.66 | 0.84 | | TRYPSIN; CHAIN: A; GLY-ALA- | HYDROLASE BETA BARREL | |
| | | | | | | | | | ARG; CHAIN: B; | | |
| 181 | 1fni | A | 330 | 536 | 1.3e−71 | 0.09 | 0.77 | | TRYIPSIN; CHAIN: A; | HYDROLASE SERINE PROTEASE, | |
| | | | | | | | | | | HYDROLASE | |
| 181 | 1qtf | A | 357 | 532 | 3.4e−09 | 0.41 | 0.19 | | EXFOLIATIVE TOXIN B; | HYDROLASE, TOXIN | |
| | | | | | | | | | CHAIN: A; | EPIDERMOLYTIC TOXIN B; SEPJNE | |
| | | | | | | | | | | PROTEASE, SUPERANTIGEN, | |
| | | | | | | | | | | HYIDROLASE, TOXIN | |
| 181 | 1s1w | B | 330 | 536 | 5.6e−67 | 0.29 | 0.60 | | ECOTIN; CHAIN: A; ANIONIC | COMPLEX (SERINE | |
| | | | | | | | | | TRYPSIN; CHAIN: B; | PROTEASE/INHIBITOR) TRYPSIN | |
| | | | | | | | | | | INHIBITOR; SERINE PROTEASE, | |
| | | | | | | | | | | INHIBITOR, COMPLEX, METAL | |
| | | | | | | | | | | BINDING SITES, 2 PROTEIN | |
| | | | | | | | | | | ENGINEERING, PROTEASE- | |
| | | | | | | | | | | SUBSTRATE INTERACTIONS, 3 | |
| | | | | | | | | | | METALLOPROTEINS | |
| 181 | 1trn | A | 330 | 536 | 1.4e−70 | 0.30 | 0.43 | | HYDROLASE(SERINE | | |
| | | | | | | | | | PROTEIINASE) TRYPSIN | | |
| | | | | | | | | | (E.C.3.4.21.4) COMPLEXED | | |
| | | | | | | | | | WITH THE INHIBITOR 1TRN 3 | | |
| | | | | | | | | | DUSOPROPYL- | | |
| | | | | | | | | | FLUOROPHOSPHOFLUORIDAT | | |
| | | | | | | | | | E(DFP)ITRN 4 HUMAN | | |
| | | | | | | | | | TRYPSIN, DFP INHIBITED 1TRN | | |
| | | | | | | | | | 6 | | |
| 181 | 2sfa | | 357 | 532 | 1.7e−13 | 0.47 | 0.62 | | SERINEPROTEINASE; CHAIN: | HYDROLASE HYDROLASE, SERINE | |
| | | | | | | | | | NULL; | PROTIFSASE | |
| 181 | 2sta | E | 330 | 534 | 1.4e−68 | 0.17 | 0.76 | | TRYPSIN; CHAIN: E; TRYPSIN | HYDROLASE/HYDROLASE INHIBITOR | |
| | | | | | | | | | INHIBITOR; CHAIN: I | SERINE PROTEINASE, TRYPSIN | |
| | | | | | | | | | | INHIBITOR | |
| 181 | 5ptp | | 330 | 536 | 2.8e−65 | 0.09 | 0.51 | | BETA TRYPSIN; CHAIN: NULL; | SERINE PROTEASE HYDROLASE, | |
| | | | | | | | | | | SERINE PROTEASE, DIGESTION, | |
| | | | | | | | | | | PANCREAS, 2 ZYMOGEN, SIGNAL | |
| 192 | 1d2t | A | 27 | 242 | 3.4e−39 | 0.45 | 0.78 | | ACID PHOSPHATASE; CHAIN: | HYDROLASE ALL ALPHA | |
| | | | | | | | | | A; | | |
| 193 | 1cdq | | 36 | 112 | 2.8e−21 | | | 142.48 | COMPLEMENT REGULATORY | | |
| | | | | | | | | | PROTEiN CD59 (NMR, 20 | | |
| | | | | | | | | | STRUCTURES) 1CDQ 3 | | |
| 193 | 1cdy | | 59 | 166 | 1e−08 | 0.23 | −0.14 | | T-CELL SURFACE | T-CELL SURFACE GLYCOPROTEIN | |
| | | | | | | | | | GLYCOPROTEIN CD4; CHAIN: | IMMUNOGLOBULIN FOLD, | |
| | | | | | | | | | NULL; | TRANSMEMBRANE, GLYCOPROTEIN, | |
| | | | | | | | | | | T-CELL, 2 MHC, LIPOPROTEIN, T- | |
| | | | | | | | | | | CELL SURFACE GLYCOPROTEIN | |
| 193 | 1erg | | 36 | 105 | 1.4e−20 | | | 132.21 | COMPLEMENT FACTOR | | |
| | | | | | | | | | HUMAN COMPLEMENT | | |
| | | | | | | | | | REGULATORY PROTEIN CD59 | | |
| | | | | | | | | | (EXTRACELLULAR 1ERG 3 | | |
| | | | | | | | | | REGION, RESIDUES 1-70) | | |
| | | | | | | | | | (NMR, RESTRAINED | | |
| | | | | | | | | | MINIMIZED 1ERG 4 AVERAGE | | |
| | | | | | | | | | STRUCTURE) 1ERG 5 | | |
| 193 | 1f97 | A | 1 | 89 | 1.4e−33 | | | 54.30 | JUNCTION ADHESION | CELL ADHESION IMMUNOGLOBULIN | |
| | | | | | | | | | MOLECULE; CHAIN: A; | SUPERFAMILY, BETA-SANDWICH | |
| | | | | | | | | | | FOLD | |
| 193 | P97 | A | 65 | 274 | 8.4e−52 | | | 269.92 | JUNCTION ADHESION | CELL ADHESION IMMUNOGLOBULIN | |
| | | | | | | | | | MOLECULE; CHAIN: A; | SUPERFAMILY, BETA-SANDWICH | |
| | | | | | | | | | | FOLD | |
| 193 | 1f97 | A | 67 | 272 | 8.4e−52 | 0.92 | 1.00 | | JUNCTION ADHESION | CELL ADHESION IMMUNOGLOBULIN | |
| | | | | | | | | | MOLECULE; CHAIN: A; | SUPERFAMILY, BETA-SANDWICH | |
| | | | | | | | | | | FOLD | |
| 193 | 1f97 | A | 67 | 274 | 3.4e−51 | 0.90 | 1.00 | | JUNCTION ADHESION | CELL ADHESION IMMUNOGLOBULIN | |
| | | | | | | | | | MOLECULE; CHAIN: A; | SUPERFAMILY, BETA-SANDWICH | |
| | | | | | | | | | | FOLD | |
| 193 | 1wio | A | 75 | 312 | 6.8e−28 | 0.01 | −0.18 | | T-CELL SURFACE | GLYCOPROTEIN CD4; | |
| | | | | | | | | | GLYCOPROTEIN CD4; CHAIN: | IMMUNOGLOBULIN FOLD, | |
| | | | | | | | | | A, B; | TRANSMEMBRANE, GLYCOPROTEIN, | |
| | | | | | | | | | | T-CELL, 2 MHC LIPOPROTEIN, | |
| | | | | | | | | | | POLYMORPHISM | |
| 194 | 1i5j | A | 20 | 86 | 1.4e−29 | | | 87.22 | AVOLIPOPROTEIN CII; CHAIN: | LIPID TRANSPORT APOC-Il; PROTEIN- | |
| | | | | | | | | | A; | LIPID INTERACTION, AMPHIPATHIC | |
| | | | | | | | | | | ALPHA HELIX | |
| 194 | 1iSj | A | 71 | 137 | 1.2e−30 | −0.93 | 0.77 | | APOLIPOPROTEIN CII; CHAIN: | LIPID TRANSPORT APOC-Il; PROTEIN- | |
| | | | | | | | | | A; | LIPID INTERACTION, AMPHIPATHIC | |
| | | | | | | | | | | ALPHA HELIX | |
| 194 | 1i5j | A | 71 | 137 | 1.2e−30 | | | 86.49 | APOLIPOPROTEIN CII; CHAIN: | LIPID TRANSPORT APOC-II; PROTEIN- | |
| | | | | | | | | | A; | LIPID INTERACTION, AMPHIPATHIC | |
| | | | | | | | | | | ALPHA HELIX | |
| 194 | 1i5j | A | 71 | 137 | 7e−29 | −0.93 | 0.77 | | APOLIPOPROTEIN CII; CHAIN: | LIPID TRANSPORT APOC-II; PROTEIN- | |
| | | | | | | | | | A; | LIPID INTERACTION, AMPHIPATHIC | |
| | | | | | | | | | | ALPHA HELIX | |
| 195 | 1h6q | A | 1 | 159 | 2.8e−60 | 0.40 | 1.00 | | TRANSLATIONALLY | TUMOR-ASSOCIATED PROTEIN TCTP, | |
| | | | | | | | | | CONTROLLED TUMOR | P23FYP; TUMOR-ASSOCIATED | |
| | | | | | | | | | PROTEIN; CHAIN: A; | PROTEIN, FUNCTION UNKNOWN | |
| 195 | 1h6q | A | 1 | 160 | 1.7e−58 | 0.37 | 1.00 | | TRANSLATIONALLY | TUMOR-ASSOCIATED PROTEIN TCTP, | |
| | | | | | | | | | CONTROLLED TUMOR | P23FYP; TUMOR-ASSOCIATED | |
| | | | | | | | | | PROTEIN; CHAIN: A; | PROTEIN, FUNCTION UNKNOWN | |
| 196 | 1awc | B | 300 | 393 | 0.00051 | −0.29 | 0.29 | | GA BINDING PROTEIN ALPHA; | COMPLEX (TRANSCRIPTION | |
| | | | | | | | | | CHAIN: A; GA BINDING | REGULATION/DNA) GABPALPHA; | |
| | | | | | | | | | PROTEIN BETA 1; CHAIN: B; | GABPBETAI1 COMPLEX | |
| | | | | | | | | | DNA; CHAIN: D, E; | (TRANSCRIPTION | |
| | | | | | | | | | | REGULATION/DNA), DNA-BINDING, 2 | |
| | | | | | | | | | | NUCLEAR PROTEIN, ETS DOMAIN, | |
| | | | | | | | | | | ANKYRIN REPEATS, TRANSCRIPTION | |
| | | | | | | | | | | 3 FACTOR | |
| 196 | 1b1x | B | 337 | 411 | 0.00034 | −0.03 | 0.09 | | CYCLIN-DEPENDENT KINASE | COMPLEX (INHIBITOR | |
| | | | | | | | | | 6; CHAIN: A; P19INK4D; CHAIN: | PROTEIN/KINASE) INhIBITOR | |
| | | | | | | | | | B; | PROTEIN, CYCLIN-DEPENDENT | |
| | | | | | | | | | | KINASE, CELL CYCLE 2 CONTROL, | |
| | | | | | | | | | | ALPHAIBETA, COMPLEX (INHIBITOR | |
| | | | | | | | | | | PROTEIN/KINASE | |
| 196 | 1dcq | A | 337 | 397 | 0.00051 | 0.15 | 0.64 | | PYK2-ASSOCIATED PROTEIN | METAL BINDING PROTEIN ZINC- | |
| | | | | | | | | | BETA; CHAIN: A; | BINDING MODULE, ANKYRIN | |
| | | | | | | | | | | REPEATS, METAL BINDING PROTEIN | |
| 196 | 1ikn | D | 337 | 394 | 0.00085 | −0.47 | 0.55 | | NF-KAPPA-B P65 SUBUNIT; | TRANSCRIPTION FACTOR P65; P50D; | |
| | | | | | | | | | CHAIN: A; NF-KAPPA-B P50D | TRANSCRIPTION FACTOR, IXBINFKB | |
| | | | | | | | | | SUBUNIT; CHAIN: C; I-KAPPA- | COMPLEX | |
| | | | | | | | | | B-ALPHA; CHAIN: D; | | |
| 196 | 1myo | | 337 | 394 | 0.00068 | 0.18 | 0.11 | | MYOTROPHIN; CHAIN: NULL | ANK-REPEATMYOTROPHIN | |
| | | | | | | | | | | ACETYLATION, NMR, ANK-REPEAT | |
| 196 | 1ufi | E | 345 | 398 | 0.001 | −0.25 | 0.84 | | NP-KAPPA-B P65; CHAIN: A, C; | COMPLEX (TRANSCRIPTION | |
| | | | | | | | | | NF-KAPPA-B P50; CHAIN: B, D; | REG/ANK REPEAT) COMPLEX | |
| | | | | | | | | | I-KAPPA-B-AIPHA; CHAIN: E, F; | (TRANSCRIPTION REGULATION/ANK | |
| | | | | | | | | | | REPEAT), ANKYRIN 2 REPEAT HELIX | |
| 196 | 1ycs | B | 337 | 423 | 0.00017 | −0.05 | 0.03 | | P53; CHAIN: A; 53BP2; CHAIN: | COMPLEX (ANTI- | |
| | | | | | | | | | B; | ONCOGENE/ANKYRIN REPEATS) | |
| | | | | | | | | | | P53BP2; ANKYRIN REPEATS, SH3, P53, | |
| | | | | | | | | | | TUMOR SUPPRESSOR, MULTIGENE 2 | |
| | | | | | | | | | | PHOSPHORYLATION, DISEASE | |
| | | | | | | | | | | MUTATION, 3 POLYMORPHISM, | |
| | | | | | | | | | | COMPLEX(ANTI- | |
| | | | | | | | | | | ONCOGEN/ANKYRIN REPEATS) | |
| 197 | 1d2h | A | 108 | 240 | 1.4e−18 | −0.26 | 0.06 | | GLYCINE N- | TRANSFERASE | |
| | | | | | | | | | METHYLTRANSFERASE; | METHYLTRANSFEPASE | |
| | | | | | | | | | CHAIN: A, B, C, D; | | |
| 198 | 1aj4 | | 16 | 168 | 2.8e−26 | | | 99.38 | TROPONIN C; CHAIN: NULL; | MUSCLE PROTEIN CTNC; CARDIAC, | |
| | | | | | | | | | | MUSCLE PROTEIN, REGULATORY, | |
| | | | | | | | | | | CALCIUM BINDING | |
| 198 | 1aj4 | | 97 | 222 | 2.8e−26 | 0.11 | 0.46 | | TROPONIN C; CHAIN: NULL; | MUSCLE PROTEIN CTNC; CARDIAC, | |
| | | | | | | | | | | MUSCLE PROTEIN, REGULATORY, | |
| | | | | | | | | | | CALCIUM BINDING | |
| 198 | 1ak8 | | 3 | 74 | 5.6e−32 | | | 59.57 | CALMODULIN; CHAIN: NULL; | CALCIUM-BINDING PROTEIN | |
| | | | | | | | | | | CALMODULIN CERIUM TR1C- | |
| | | | | | | | | | | DOMAIN, RESIDUES 1-75; CERIUM- | |
| | | | | | | | | | | LOADED, CALCIUM-BINDING | |
| | | | | | | | | | | PROTEIN | |
| 198 | 1ap4 | | 20 | 96 | 1.1e−18 | 0.79 | 1.00 | | CARDIAC N-TROPONIN C; | CALCIUM-BINDING CNTNC; | |
| | | | | | | | | | CHAIN: NULL; | CALCIUM-BINDING, REGULATION, | |
| | | | | | | | | | | TROPONIN C, CARDIAC MUSCLE 2 | |
| | | | | | | | | | | CONTRACTION | |
| 198 | 1aul | B | 18 | 179 | 2.8e−16 | | | 75.78 | SERINE/THREONINE | HYDROLASE CALCINEURIN; | |
| | | | | | | | | | PHOSPHATASE 2B; CHAIN: A, | HYDROLASE, PHOSPHATASE, | |
| | | | | | | | | | B; | IMMUNOSUPPRESSION | |
| 198 | 1avs | A | 1 | 76 | 2.8e−28 | | | 54.68 | TROPONIN C; CHAIN: A, B; | MUSCLE CONTRACTION MUSCLE | |
| 198 | 1b1q | | 1 | 78 | 8.4e−29 | | | 50.01 | N-TROPONIN C; CHAIN: NULL; | CALCIUM-BINDING PROTEIN SNTNC; | |
| | | | | | | | | | | CALCIUM-BINDING, REGULATION, | |
| | | | | | | | | | | TROPONIN C, CARDIAC MUSCLE, 2 | |
| | | | | | | | | | | CONTRACTION | |
| 198 | 1br1 | B | 26 | 166 | 1.3e−38 | 0.63 | 1.00 | | MYOSIN; CHAIN: A, B, C, D, E, | MUSCLE PROTEIN MDE; MUSCLE | |
| | | | | | | | | | F, G, H; | PROTEIN | |
| 198 | 1br1 | B | 26 | 166 | 1.3e−38 | | | 92.46 | MYOSIN; CHAIN: A, B, C, D, E, | MUSCLE PROTEIN MDE; MUSCLE | |
| | | | | | | | | | F, G, H; | PROTEIN | |
| 198 | 1br1 | B | 97 | 209 | 1.4e−11 | 0.24 | 0.22 | | MYOSIN; CHAIN: A, B, C, D, E, | MUSCLE PROTEIN MDE; MUSCLE | |
| | | | | | | | | | F, G, H; | PROTEIN | |
| 198 | 1cdm | A | 102 | 209 | 1.3e−29 | −0.08 | 0.19 | | CALCIUM-BINDING PROTEIN | | |
| | | | | | | | | | CALMODULIN COMPLEXED | | |
| | | | | | | | | | WITH CALMODULINBINDING | | |
| | | | | | | | | | DOMMNOF 1CDM3 | | |
| | | | | | | | | | CALMODULIN-DEPENDENT | | |
| | | | | | | | | | PROTEIN KINASE II 1CDM 4 | | |
| 198 | 1cdm | A | 26 | 164 | 8.4e−59 | 0.72 | 1.00 | | CALCIUM-BINDING PROTEIN | | |
| | | | | | | | | | CALMODULIN COMPLEXED | | |
| | | | | | | | | | WITH CALMODULIN-BINDING | | |
| | | | | | | | | | DOMAIN OF 1CDM 3 | | |
| | | | | | | | | | CALMODULIN-DEPENDENT | | |
| | | | | | | | | | PROTEIN KINASE II 1CDM 4 | | |
| 198 | 1cdm | A | 26 | 164 | 8.4e−59 | | | 118.25 | CALCIUM-BINDING PROTEIN | | |
| | | | | | | | | | CALMODULIN COMPLEXED | | |
| | | | | | | | | | WITH CALMODULIN-BINDING | | |
| | | | | | | | | | DOMAIN OF 1CDM 3 | | |
| | | | | | | | | | CALMODULIN-DEPENDENT | | |
| | | | | | | | | | PROTEIN KINASE II 1CDM 4 | | |
| 198 | 1cll | | 102 | 209 | 9.8e−36 | −0.05 | 0.24 | | CALCIUM-BINDING PROTEIN | | |
| | | | | | | | | | CALMODULIN (VERTEBRATE) | | |
| | | | | | | | | | 1CLL 3 | | |
| 198 | 1cll | | 15 | 91 | 1.4e−19 | 0.39 | 1.00 | | CALCIUM-BINDING PROTEIN | | |
| | | | | | | | | | CALMODULIN (VERTEBRATE) | | |
| | | | | | | | | | 1CLL 3 | | |
| 198 | 1cll | | 1 | 86 | 1.4e−42 | | | 50.32 | CALCIUM-BINDING PROTEIN | | |
| | | | | | | | | | CALMODULIN (VERTEBRATE) | | |
| | | | | | | | | | 1CLL 3 | | |
| 198 | 1cll | | 26 | 164 | 5.6e−65 | 0.73 | 1.00 | | CALCIUM-BINDING PROTEIN | | |
| | | | | | | | | | CALMODULIN (VERTEBRATE) | | |
| | | | | | | | | | 1CLL 3 | | |
| 198 | 1cll | | 26 | 165 | 5.6e−65 | | | 135.44 | CALCIUM-BINDING PROTEIN | | |
| | | | | | | | | | CALMODULIN (VERTEBRATE) | | |
| | | | | | | | | | 1CLL 3 | | |
| 198 | 1cmf | | 15 | 87 | 1.4e−05 | | | 70.55 | CALMODULIN (VERTEBRATE); | CALCIUM-BINDING PROTEIN | |
| | | | | | | | | | 1CMF 6 CHAIN: NULL; 1CMF 7 | CALMODULIN APO TR2C-DOMAIN; | |
| | | | | | | | | | | 1CMF 9 | |
| 198 | 1dgu | A | 12 | 177 | 8.4e−16 | | | 64.07 | CALCIUM-SATURATED CIB; | BLOOD CLOTTING HELICAL, EF- | |
| | | | | | | | | | CHAIN: A | HANDS, BLOOD CLOTTING | |
| 198 | 1dtl | A | 20 | 165 | 2.8e−26 | | | 91.37 | CARDIAC TROPONIN C; CHAIN: | STRUCTURAL PROTEIN HELIX-TURN- | |
| | | | | | | | | | A; | HELIX | |
| 198 | 1dtl | A | 97 | 222 | 2.8e−26 | 0.36 | 0.63 | | CARDIAC TROPONIN C; CHAIN: | STRUCTURAL PROTEIN HELIX-TURN- | |
| | | | | | | | | | A; | HELIX | |
| 198 | 1exr | A | 102 | 209 | 2.8e−33 | 0.04 | 0.29 | | CALMODULIN; CHAIN: A; | METAL TRANSPORT CALMODULIN, | |
| | | | | | | | | | | HIGH RESOLUTION, DISORDER | |
| 198 | 1exr | A | 15 | 90 | 4.2e−18 | 0.29 | 0.95 | | CALMODULIN; CHAIN: A; | METAL TRANSPORT CALMODULIN, | |
| | | | | | | | | | | HIGH RESOLUTION, DISORDER | |
| 198 | 1exr | A | 24 | 163 | 1.4e−62 | 0.75 | 1.00 | | CALMODULIN; CHAIN: A; | METAL TRANSPORT CALMODULIN, | |
| | | | | | | | | | | HIGH RESOLUTION, DISORDER | |
| 198 | 1exr | A | 24 | 165 | 1.4e−62 | | | 132.92 | CALMODULIN; CHAIN: A; | METAL TRANSPORT CALMODULIN, | |
| | | | | | | | | | | HIGH RESOLUTION, DISORDER | |
| 198 | 1f4q | A | 3 | 130 | 3.4e−10 | −0.15 | 0.30 | | GRANCALCIN; CHAIN: A, B; | METAL TRANSPORT PENTA-EF-HAND | |
| | | | | | | | | | | PROTEIN, CALCIUM BINDING | |
| | | | | | | | | | | PROTEIN | |
| 198 | 1fpw | A | 48 | 216 | 8.4e−19 | −0.21 | 0.37 | | CALCIUM-BINDING PROTEIN | METAL BINDINGPROTEIN YEAST | |
| | | | | | | | | | NCS-1; CHAIN: A; | FREQUENIN EF-HAND, CALCIUM | |
| 198 | 1fw4 | A | 20 | 84 | 1.4e−05 | | | 67.19 | CALMODULIN; CHAIN: A; | METAL BINDING PROTEIN EF-HAIND, | |
| | | | | | | | | | | HELIX-LOOP-HELIX, FRAGMENT, | |
| | | | | | | | | | | CALCIUM, TR2C, C-2 TERMINAL | |
| | | | | | | | | | | DOMAIN, CALMODULIN | |
| 198 | 1g8i | A | 6 | 180 | 7e−14 | | | 65.19 | NEURONAL CALCIUM SENSOR | METAL BINDING PROTEIN | |
| | | | | | | | | | 1; CHAIN: A, B; | FREQUENIN; CALCIUM BINDING- | |
| | | | | | | | | | | PROTEIN, EF-HAND, CALCIUM ION | |
| 198 | 1ggw | A | 28 | 166 | 7e−11 | | | 89.53 | CDC4P; CHAIN: A; | CYTOKINE EF-HAND PROTEIN, | |
| | | | | | | | | | | MYOSIN LIGHT CHAIN; LiGHT | |
| | | | | | | | | | | CHAIN, CYTOKINESIS, CELL CYCLE, | |
| | | | | | | | | | | EF-HAND | |
| 198 | 1hqv | A | 15 | 203 | 2.8e−23 | | | 60.78 | PROGRAMMED CELL DEATH | APOPTOSIS PROBABLE CALCIUM- | |
| | | | | | | | | | PROTEIN 6; CHAIN: A; | BINDING PROTEIN ALG-2; PENTA-EF- | |
| | | | | | | | | | | HAND PROTEIN, CALCIUM BINDING | |
| | | | | | | | | | | PROTEIN | |
| 198 | 1hqv | A | 37 | 194 | 2.8e−23 | 0.19 | 0.24 | | PROGRAMMED CELL DEATH | APOPTOSIS PROBABLE CALCIUM- | |
| | | | | | | | | | PROTEIN 6; CHAIN: A; | BINDING PROTEIN ALG-2; PENTA-EF- | |
| | | | | | | | | | | HAND PROTEIN, CALCIUM BINDING | |
| | | | | | | | | | | PROTEIN | |
| 198 | 1iku | | 5 | 191 | 5.6e−11 | | | 58.57 | RECOVERIN; CHAIN: NULL; | CALCIUM-BINDING PROTEIN | |
| | | | | | | | | | | CALCIUM-MYRISTOYL SWITCH, | |
| | | | | | | | | | | CALCUIM-BINDING PROTEIN | |
| 198 | 1tcf | | 102 | 224 | 7e−30 | 0.06 | 0.40 | | TROPONIN C; CHAIN: NULL; | CALCIUM-REGULNED MUSCLE | |
| | | | | | | | | | | CONTRACTION MUSCLE | |
| | | | | | | | | | | CONTRACTION, CALCIUM-BINDlNG, | |
| | | | | | | | | | | TROPONIN, E-F HAND, 2 OPEN | |
| | | | | | | | | | | CONFORMATION REGULATORY | |
| | | | | | | | | | | DOMAIN, CALCIUM-REGULATED 3 | |
| | | | | | | | | | | MUSCLE CONTRACTION | |
| 198 | 1tcf | | 17 | 165 | 7e−30 | | | 104.72 | TROPONIN C; CHAIN: NULL; | CALCIUM-REGULATED MUSCLE | |
| | | | | | | | | | | CONTRACTION MUSCLE | |
| | | | | | | | | | | CONTRACTION, CALCIUM-BINDING, | |
| | | | | | | | | | | TROPONIN, E-F HAND, 2 OPEN | |
| | | | | | | | | | | CONFORMATION REGULATORY | |
| | | | | | | | | | | DOMAIN, CALCIUM-REGULATED 3 | |
| | | | | | | | | | | MUSCLE CONTRACTION | |
| 198 | 1top | | 102 | 224 | 28e−30 | 0.15 | 0.87 | | CONTRACTILE SYSTEM | | |
| | | | | | | | | | PROTEIN TROPONIN C 1TOP 3 | | |
| 198 | 1top | | 13 | 168 | 2.8e−30 | | | 107.77 | CONTRACTILE SYSTEM | | |
| | | | | | | | | | PROTEIN TROPONIN C 1TOP 3 | | |
| 198 | 1trc | A | 19 | 86 | 1.4e−05 | | | 63.97 | CALCIUM BINDING PROTEIN | | |
| | | | | | | | | | CALMODULIN (/TR=2=C$ | | |
| | | | | | | | | | FRAGMENT COMPRISING | | |
| | | | | | | | | | RESIDUES 78-148 LTRC 3 OF | | |
| | | | | | | | | | THE INTACT MOLECULE) 1TRC | | |
| | | | | | | | | | 4 | | |
| 198 | 1trf | | 5 | 76 | 2.3e−28 | | | 53.23 | MUSCLE PROTEIN TROPONIN C | | |
| | | | | | | | | | (TR1C FRAGMENT) (APO | | |
| | | | | | | | | | FORM) (NMR, 1 STRUCTURE) | | |
| | | | | | | | | | 1TRF 3 | | |
| 198 | 1vrk | A | 102 | 209 | 2.8e−34 | 0.24 | 0.57 | | CALMODULIN; CHAIN: A; RS20; | CALMODULIN, CALCIUM BINDING, | |
| | | | | | | | | | CHAIN: B; | HELIX-LOOP-HELIX, SIGNALLING, 2 | |
| | | | | | | | | | | COMPLEX(CALCIUM-BINDING | |
| | | | | | | | | | | PROTEINYEPTIDE) | |
| 198 | 1vrk | A | 15 | 93 | 1.1e−18 | 0.39 | 0.99 | | CALMODULIN; CHAIN: A; RS20; | CALMODULIN, CALCIUM BINDING, | |
| | | | | | | | | | CHAIN: B; | HELIX-LOOP-HELIX, SIGNALLING, 2 | |
| | | | | | | | | | | COMPLEX(CALCIUM-BINDING | |
| | | | | | | | | | | PROTEIN/PEPTIDE) | |
| 198 | 1vrk | A | 23 | 166 | 9.8e−64 | 0.60 | 1.00 | | CALMODULIN; CHAIN: A; RS20; | CALMODULIN, CALCIUM BINDING, | |
| | | | | | | | | | CHAIN: B; | HELIX-LOOP-HELIX, SIGNALLING, 2 | |
| | | | | | | | | | | COMPLEX(CALCIUM-BINDING | |
| | | | | | | | | | | PROTEIN/PEPTIDE) | |
| 198 | 1vrk | A | 24 | 166 | 9.8e−64 | | | 133.11 | CALMODULIN; CHAIN: A; RS20; | CALMODULIN, CALCIUM BINDING, | |
| | | | | | | | | | CHAIN: B; | HELIX-LOOP-HELIX, SIGNALLING, 2 | |
| | | | | | | | | | | COMPLEX(CALCIUM-BINDING | |
| | | | | | | | | | | PROTEIN/PEPTIDE) | |
| 198 | 1wdc | B | 1 | 89 | 7e−20 | | | 67.20 | SCALLOP MYOSIN; CHAIN: A, | MUSCLE PROTEIN MYOSIN, | |
| | | | | | | | | | B, C; | CALCIUM BINDING PROTEIN, | |
| | | | | | | | | | | MUSCLE PROTEIN | |
| 198 | 1wdc | B | 26 | 168 | 1.7e−43 | | | 163.19 | SCALLOP MYOSIN; CHAIN: A, | MUSCLE PROTEIN MYOSIN, | |
| | | | | | | | | | B, C; | CALCIUM BINDING PROTEIN, | |
| | | | | | | | | | | MUSCLE PROTEIN | |
| 198 | 1wdc | B | 26 | 168 | 5.6e−35 | 0.48 | 1.00 | | SCALLOP MYOSIN; CHAIN: A, | MUSCLE PROTEIN MYOSIN, | |
| | | | | | | | | | B, C; | CALCIUM BINDING PROTEIN, | |
| | | | | | | | | | | MUSCLE PROTEIN | |
| 198 | 1wdc | B | 28 | 166 | 1.7e−43 | 0.52 | 1.00 | | SCALLOP MYOSIN; CHAIN: A, | MUSCLE PROTEIN MYOSIN, | |
| | | | | | | | | | B, C; | CALCIUM BINDING PROTEIN, | |
| | | | | | | | | | | MUSCLE PROTEIN | |
| 198 | 1wdc | C | 26 | 169 | 1.3e−06 | | | 89.97 | SCALLOP MYOSIN; CHAIN: A, | MUSCLE PROTEIN MYOSIN, | |
| | | | | | | | | | B, C; | CALCIUM BINDING PROTEIN, | |
| | | | | | | | | | | MUSCLE PROTEIN | |
| 198 | 2mys | B | 1 | 90 | 2.8e−18 | | | 51.56 | MYOSIN; CHAIN: A, B, C; | MUSCLE PROTEIN MUSCLE PROTEIN, | |
| | | | | | | | | | | MYOSIN SUBFRAGMENT-1, MYOSIN | |
| | | | | | | | | | | HEAD, 2 MOTOR PROTEIN | |
| 198 | 2mys | B | 26 | 166 | 1.7e−38 | −0.25 | 1.00 | | MYOSIN; CHAIN: A, B, C; | MUSCLE PROTEIN MUSCLE PROTEIN, | |
| | | | | | | | | | | MYOSIN SUBFRAGMENT-1, MYOSIN | |
| | | | | | | | | | | HEAD, 2 MOTOR PROTEIN | |
| 198 | 2mys | B | 26 | 169 | 1.7e−38 | | | 146.55 | MYOSIN; CHAIN: A, B, C; | MUSCLE PROTEIN MUSCLE PROTEIN, | |
| | | | | | | | | | | MYOSIN SUBFRAGMENT-1, MYOSIN | |
| | | | | | | | | | | HEAD, 2 MOTOR PROTEIN | |
| 198 | 2mys | B | 7 | 78 | 5.6e−22 | | | 50.77 | MYOSIN; CHAIN: A, B, C; | MUSCLE PROTEIN MUSCLE PROTEIN, | |
| | | | | | | | | | | MYOSIN SUBFRAGMENT-1, MYOSIN | |
| | | | | | | | | | | HEAD, 2 MOTOR PROTEIN | |
| 198 | 2mys | B | 96 | 198 | 5.6e−17 | −0.25 | 0.05 | | MYOSIN; CHAIN: A, B, C; | MUSCLE PROTEIN MUSCLE PROTEIN, | |
| | | | | | | | | | | MYOSIN SUBFRAGMENT-1, MYOSIN | |
| | | | | | | | | | | HEAD, 2 MOTOR PROTEIN | |
| 198 | 2mys | C | 29 | 165 | 2.8e−35 | | | 87.97 | MYOSIN; CHAIN: A, B, C; | MUSCLE PROTEIN MUSCLE PROTEIN, | |
| | | | | | | | | | | MYOSIN SUBFRAGMENT-1, MYOSIN | |
| | | | | | | | | | | HEAD, 2 MOTOR PROTEIN | |
| 198 | 2mys | C | 32 | 165 | 2.8e−35 | −0.05 | 1.00 | | MYOSIN; CHAIN: A, B, C; | MUSCLE PROTEIN MUSCLE PROTEIN, | |
| | | | | | | | | | | MYOSIN SUBFRAGMENT-1, MYOSIN | |
| | | | | | | | | | | HEAD, 2 MOTOR PROTEIN | |
| 201 | 1ajj | | 116 | 151 | 5.1e−09 | −0.28 | 0.13 | | LOW-DENSITY LIPOPROTEIN | RECEPTOR LR5; RECEPTOR, LDL | |
| | | | | | | | | | RECEPTOR; CHAIN: NULL; | RECEPTOR, CYSTEINE-RICH | |
| | | | | | | | | | | MODULE, CALCIUM | |
| 201 | 1ajj | | 117 | 151 | 5.6e−09 | 0.06 | 0.01 | | LOW-DENSITY LIPOPROTEIN | RECEPTOR LR5; RECEPTOR, LDL | |
| | | | | | | | | | RECEPTOR; CHAIN: NULL; | RECEPTOR, CYSTEINE-RICH | |
| | | | | | | | | | | MODULE, CALCIUM | |
| 201 | 1f8z | A | 117 | 151 | 1.3e−07 | −0.12 | 0.06 | | LOW-DENSITY LIPOPROTEIN | LIPID BINDING PROTEIN LDL | |
| | | | | | | | | | RECEPTOR; CHAIN: A; | RECEPTOR, L1GANTJ-I3INDING | |
| | | | | | | | | | | DOMAIN, CALCIUM-BINDING, 2 | |
| | | | | | | | | | | FAMILIAL | |
| | | | | | | | | | | HYPERCHOLESTEROLEMIA | |
| 201 | 1ldl | | 116 | 151 | 5.1e−07 | 0.29 | 0.33 | | LOW-DENSITY LIPOPROTEIN | BINDING PROTEIN LB1; 1LDL 7LDL | |
| | | | | | | | | | RECEPTOR; 1LDL 4 CHAIN: | RECEPTOR CYSTEINE-RICH REPEAT | |
| | | | | | | | | | NULL; 1LDL 5 | 1LDL 15 | |
| 201 | 1sfp | | 1 | 113 | 8.4e−07 | 0.35 | 0.04 | | ASFP; CHAIN: NULL; | SPERMADHESIN ACIDIC SEMINAL | |
| | | | | | | | | | | PROTEIN; SPERMADHESIN, BOVINE | |
| | | | | | | | | | | SEMINAL PLASMA PROTEIN, ACIDIC | |
| | | | | | | | | | | 2 SEMINAL FLUID PROTEIN, ASFP, | |
| | | | | | | | | | | CUB DOMAIN, X-RAY CRYSTAL 3 | |
| | | | | | | | | | | STRUCTURE, GROWTH FACTOR | |
| 201 | 1sfp | | 26 | 114 | 1.7e−10 | 0.37 | 0.09 | | ASFP; CHAIN: NULL; | SPERMADHESIN ACIDIC SEMINAL | |
| | | | | | | | | | | PROTEIN; SPERMADHESIN, BOVINE | |
| | | | | | | | | | | SEMINAL PLASMA PROTEIN, ACIDIC | |
| | | | | | | | | | | 2 SEMINAL FLUID PROTEIN, ASFP, | |
| | | | | | | | | | | CUB DOMAIN, X-RAY CRYSTAL 3 | |
| | | | | | | | | | | STRUCTURE, GROWTH FACTOR | |
| 201 | 1spp | A | 26 | 112 | 8.5e−09 | 0.35 | 0.30 | | MAJOR SEMINAL PLASMA | COMPLEX (SEMINAL PLASMA | |
| | | | | | | | | | GLYCOPROTEIN PSP-I; CHAIN: | PROTEIN/SPP) SEMINAL PLASMA | |
| | | | | | | | | | A; MAJOR SEMINAL PLASMA | PROTEINS, SPERMADHESINS, CUB | |
| | | | | | | | | | GLYCOPROTEIN PSP-II; CHAIN: | DOMAIN 2 ARCHITECTURE, | |
| | | | | | | | | | B | COMPLEX (SEMINAL PLASMA | |
| | | | | | | | | | | PROTEIN/SPP) | |
| 201 | 1spp | B | 26 | 112 | 5.1e−10 | 0.17 | 0.11 | | MAJOR SEMINAL PLASMA | COMPLEX (SEMINAL PLASMA | |
| | | | | | | | | | GLYCOPROTEIN PSP-I; CHAIN: | PROTElN/SPP) SEMINAL PLASMA | |
| | | | | | | | | | A; MAJOR SEMINAL PLASMA | PROTEINS, SPERMADHESINS, CUB | |
| | | | | | | | | | GLYCOPROTEIN PSP-II; CHAIN: | DOMAIN 2 ARCHITECTURE, | |
| | | | | | | | | | B | COMPLEX (SEMINAL PLASMA | |
| | | | | | | | | | | PROTEIN/SPP) | |
| 208 | 1eis | A | 277 | 354 | 9.8e−07 | 0.46 | −0.09 | | AGGLUTININ ISOLBCTIN | SUGAR BINDING PROTEIN UDA; | |
| | | | | | | | | | VI/AGGLUTININ ISOLECTIN V; | LECTIN, HEVEIN DOMAIN, UDA, | |
| | | | | | | | | | CHAIN: A; | SUPERANTIGEN | |
| 208 | 9wga | A | 485 | 655 | 4.2e−11 | 0.19 | −0.19 | | LECTIN (AGGLUTININ) WHEAT | | |
| | | | | | | | | | GERM AGGLUTININ | | |
| | | | | | | | | | (ISOLECTIN 2) 9WGA 3 | | |
| 208 | 9wga | A | 915 | 1107 | 1.4e−13 | 0.04 | −0.19 | | LECTIN (AGGLUTLNIN) WHEAT | | |
| | | | | | | | | | GERM AGGLUTININ | | |
| | | | | | | | | | (ISOLECTIN 2) 9WGA 3 | | |
| 212 | 1e08 | A | 1 | 325 | 0 | | | 152.98 | [FE]-HYDROGENASE (LARGE | HYDROGENASE HYDROGENASE, | |
| | | | | | | | | | SUBUNIT); CHAIN: A; [FE]- | CYTOCUROME C553, ELECTRON | |
| | | | | | | | | | HYDROGENASE (SMALL | TRANSFER COMPLEX | |
| | | | | | | | | | SUBUNIT); CHAIN: D; | | |
| | | | | | | | | | CYTOCHROME C553; CHAIN: E | | |
| 212 | 1hfe | L | 1 | 325 | 0 | | | 137.95 | FE-ONLY HYDROGENASE | HYDROGENASE FE-ONLY | |
| | | | | | | | | | (SMALLER SUBUNIT); CHAIN: | HYDROGENASE, X-RAY | |
| | | | | | | | | | 5, T; FE-ONLY HYDROGENASE | CRYSTALLOGRAPHY, HYDROGENE 2 | |
| | | | | | | | | | (LARGER SUBUNIT); CHAIN: L, | METABOLISM, PERIPLASM | |
| | | | | | | | | | M; | | |
| 212 | 1jgj | A | 8 | 217 | 0.0068 | | | 51.59 | SENSORY RHODOPSIN II; | SIGNALING PROTEIN SENSORY | |
| | | | | | | | | | CHAIN: A; | RHODOPSIN, MEMBRANE PROTEIN, | |
| | | | | | | | | | | PHOTOTAXIS RECEPTOR | |
| 213 | 1dv8 | A | 199 | 326 | 5.6e−34 | −0.18 | 0.33 | | ASIALOGLYCOPROTEIN | SIGNALING PROTEIN HEPATIC | |
| | | | | | | | | | RECEPTOR 1; CHAIN: A; | LECTIN H1; C-TYPE LECTIN CED | |
| 213 | 1hq8 | A | 194 | 308 | 5.6e−28 | | | 86.06 | NKG2-D; CHAIN: A; | APOPTOSIS HOMODIMER, CIS- | |
| | | | | | | | | | | PROLINE | |
| 213 | 1hyr | A | 193 | 315 | 2.8e−26 | | | 100.53 | NKG2-D TYPE II INTEGRAL | IMMUNE SYSTEM NKG2D; MIC-A, | |
| | | | | | | | | | MEMBRANE PROTEIN; CHAIN: | MIC, PERB11; ACTIVATING NK CELL | |
| | | | | | | | | | B, A; MHC CLASS I CHAIN- | RECEPTOR, NKG2D, C-TYPE-LECTIN | |
| | | | | | | | | | RELATED PROTEIN A; CHAIN: | LIKE, MIC-2 A, MHC-I, COMPLEX, | |
| | | | | | | | | | C; | IMMUNE SYSTEM | |
| 213 | 1hyr | A | 48 | 163 | 1.4e−27 | | | 94.69 | NKG2-D TYPE II INTEGRAL | IMMUNE SYSTEM NKG2D; MIC-A, | |
| | | | | | | | | | MEMBRANE PROTEIN; CHAIN: | MIC, PERB11; ACTIVATING NK CELL | |
| | | | | | | | | | B, A; MHC CLASS I CHAIN- | RECEPTOR, NKG2D, C-TYPE-LECTIN | |
| | | | | | | | | | RELATED PROTEIN A; CHAIN: | LIKE, MIC-2 A, MHC-I, COMPLEX, | |
| | | | | | | | | | C; | IMMUNE SYSTEM | |
| 214 | 12e8 | L | 71 | 269 | 9.8e−17 | | | 73.24 | 2E8 (IGG1=KAPPA=) | IMMUNOGLOBULIN | |
| | | | | | | | | | ANTIBODY; CHAIN: L, H, M, P; | IMMUNOGLOBULIN | |
| 214 | 12e8 | L | 83 | 267 | 9.8e−17 | 0.28 | 0.75 | | 2E8 (IGG1=KAPPA=) | IMMUNOGLOBULIN | |
| | | | | | | | | | ANTIBODY; CHAIN: L, H, M, P; | IMMUNOGLOBULIN | |
| 214 | 1adq | L | 72 | 258 | 2.8e−22 | 0.38 | 1.00 | | IGG4 REA; CHAIN: A; RF-AN | COMPLEX | |
| | | | | | | | | | IGM/LAMBDA; CHAIN: H, L; | (IMMUNOGLOBULIN/AUTOANTIGEN) | |
| | | | | | | | | | | COMPLEX | |
| | | | | | | | | | | (IMMUNOGLOBULIN/AUTOANTIGEN), | |
| | | | | | | | | | | RHEUMATOID FACTOR 2 AUTO- | |
| | | | | | | | | | | ANTIBODY COMPLEX | |
| 214 | 1adq | L | 72 | 271 | 2.8e−22 | | | 72.32 | IGG4 REA; CHAIN: A; RF-AN | COMPLEX | |
| | | | | | | | | | 1GM/LAMBDA; CHAIN: H, L; | (IMMUNOGLOBULIN/AUTOANTIGEN) | |
| | | | | | | | | | | COMPLEX | |
| | | | | | | | | | | (IMMUNOGLOBULIN/AUTOANTIGEN) | |
| | | | | | | | | | | RHEUMATOID FACTOR 2 AUTO- | |
| | | | | | | | | | | ANTIBODY COMPLEX | |
| 214 | 1b2w | L | 70 | 269 | 4.2e−20 | | | 73.56 | ANTIBODY (LIGHT CHAIN), | IMMUNE SYSTEM | |
| | | | | | | | | | CHAIN: L; ANTIBODY (HEAVY | IMMUNOGLOBULIN; | |
| | | | | | | | | | CHAIN); CHAIN: H; | IMMUNOGLOBULIN ANTIBODY | |
| | | | | | | | | | | ENGINEERING, HUMANIZED AND | |
| | | | | | | | | | | CHIMERIC ANTIBODY, FAB, 2 X-RAY | |
| | | | | | | | | | | STRUCTURE, THREE-DIMENSIONAL | |
| | | | | | | | | | | STRYCTUHE, GAMMA-3 | |
| | | | | | | | | | | INTERFERON, IMMUNE SYSTEM | |
| 214 | 1b6d | A | 70 | 269 | 7e−21 | | | 73.38 | IMMUNOGLOBULIN; CHAIN: A, | IMMUNOGLOBULIN | |
| | | | | | | | | | B; | IMMUNOGLOBULIN, KAPPA LIGHT- | |
| | | | | | | | | | | CHAIN DIMER HEADER | |
| 214 | 1bih | A | 2 | 362 | 1.3e−43 | 0.06 | 0.99 | | HEMOLIN; CHAIN: A, B; | INSECT IMMUNITY INSECT | |
| | | | | | | | | | | IMMUNITY, LPS-BINDING, | |
| | | | | | | | | | | HOMOPHILIC ADHESION | |
| 214 | 1bih | A | 2 | 364 | 1.3e−43 | | | 121.44 | HEMOLIN; CHAIN: A, B; | INSECT IMMUNITY INSECT | |
| | | | | | | | | | | IMMUNITY, LPS-BINDING, | |
| | | | | | | | | | | HOMOPHILIC ADHESION | |
| 214 | 1bih | A | 73 | 386 | 5.1e−38 | 0.18 | 0.77 | | HEMOLIN; CHAIN: A,B; | INSECT IMMUNITY INSECT | |
| | | | | | | | | | | IMMUNITY, LPS-BINDING, | |
| | | | | | | | | | | HOMOPHILIC ADHESION | |
| 214 | 1bj1 | J | 76 | 267 | 1.4e−21 | 0.10 | 0.89 | | FAB FRAGMENT; CHAIN: L, H, | COMPLEX (ANTIBODY/ANTIGEN) | |
| | | | | | | | | | J, K; VASCULAR ENDOTHELIAL | FAB-12; VEGF; COMPLEX | |
| | | | | | | | | | GROWTH FACTOR; CHAIN: V, | (ANTIBODY/ANTIGEN), ANGIOGENIC | |
| | | | | | | | | | | FACTOR | |
| 214 | 1bql | H | 84 | 268 | 9.8e−14 | 0.01 | 0.34 | | COMPLEX | | |
| | | | | | | | | | (ANTIBODY/ANTIGEN) HYHEL- | | |
| | | | | | | | | | 5 FAB COMPLEXED WITH | | |
| | | | | | | | | | BOBWHITE QUAIL LYSOZYME | | |
| | | | | | | | | | 1BQL3 1BQL 95 | | |
| 214 | 1bz7 | A | 70 | 265 | 4.2e−19 | | | 73.01 | ANTIBODY R24 (LIGHT CHAIN); | IMMUNE SYSTEM ANTIBODY (FAB | |
| | | | | | | | | | CHAIN: A; ANTIBODY R24 | FRAGMENT), IMMUNE SYSTEM | |
| | | | | | | | | | (HEAVY CHAIN); CHAIN: B; | | |
| 214 | 1cic | A | 83 | 267 | 5.6e−17 | 0.35 | 0.82 | | IG HEAVY CHAIN V REGIONS; | IMMUNOGLOBULIN | |
| | | | | | | | | | CHAIN: A; IG HEAVY CHAIN V | IMMUNOGLOBULIN, FAB COMPLEX, | |
| | | | | | | | | | REGIONS; CHAIN: B; IG HEAVY | IDIOTOPE, ANTI-IDIOTOPE | |
| | | | | | | | | | CHAIN V REGIONS; CHAIN: C; | | |
| | | | | | | | | | IG HEAVY CHAIN V REGIONS; | | |
| | | | | | | | | | CHAIN: D; | | |
| 214 | 1cs6 | A | 10 | 363 | 5.6e−41 | 0.10 | 0.86 | | AXONTN-1; CHAIN: A; | CELL ADHESION NEURAL CELL | |
| | | | | | | | | | | ADHESION | |
| 214 | 1cs6 | A | 15 | 364 | 1e−43 | | | 99.18 | AXONIN-1; CHAIN: A; | CELL ADHESION NEURAL CELL | |
| | | | | | | | | | | ADHESION | |
| 214 | 1cs6 | A | 66 | 429 | 5.6e−40 | 0.19 | 0.76 | | AXONIN-1; CHAIN: A; | CELL ADHESION NEURAL CELL | |
| | | | | | | | | | | ADHESION | |
| 214 | 1cs6 | A | 72 | 379 | 1e−43 | 0.09 | 0.16 | | AXONIN-1; CHAIN: A; | CELL ADHESION NEURAL CELL | |
| | | | | | | | | | | ADHESION | |
| 214 | 1cvs | C | 169 | 362 | 4.2e−38 | 0.15 | 0.48 | | FIBROBLAST GROWTH | GROWTH FACTOR/GROWTH FACTOR | |
| | | | | | | | | | FACTOR 2; CHAIN: A, B; | RECEPTOR FGF, FGFR, | |
| | | | | | | | | | FIBROBLAST GROWTH | IMMUNOGLOBULIN-LIKE, SIGNAL | |
| | | | | | | | | | FACTOR RECEPTOR 1; CHAIN: | TRANSDUCTION, 2 DIMERIZATION, | |
| | | | | | | | | | C, D; | GROWTH FACTOR/GROWTH FACTOR | |
| | | | | | | | | | | RECEPTOR | |
| 214 | 1cvs | C | 6 | 167 | 8.4e−20 | 0.01 | −0.09 | | FIBROBLAST GROWTH | GROWTH FACTOR/GROWTH FACTOR | |
| | | | | | | | | | FACTOR 2; CHAIN: A, B; | RECEPTOR FGF, FGFR, | |
| | | | | | | | | | FIBROBLAST GROWTH | IMMUNOGLOBULIN-LIKE, SIGNAL | |
| | | | | | | | | | FACTOR RECEPTOR 1; CHAIN: | TRANSDUCTION, 2 DIMERIZATION, | |
| | | | | | | | | | C, D; | GROWTH FACTOR/GROWTH FACTOR | |
| | | | | | | | | | | RECEPTOR | |
| 214 | 1cvs− | C | 81 | 270 | 4.2e−22 | 0.02 | −0.05 | | FIBROBLAST GROWTH | GROWTH FACTOR/GROWTH FACTOR | |
| | | | | | | | | | FACTOR 2; CHAIN: A, B; | RECEPTOR FGF, FGFR, | |
| | | | | | | | | | FIBROBLAST GROWTH | IMMUNOGLOBULIN-LIKE, SIGNAL | |
| | | | | | | | | | FACTOR RECEPTOR 1; CHAIN: | TRANSDUCTION, 2 DIMERIZATION, | |
| | | | | | | | | | C, D; | GROWTH FACTOR/GROWTH FACTOR | |
| | | | | | | | | | | RECEPTOR | |
| 214 | 1cvs | D | 169 | 362 | 1.3e−39 | 0.32 | 0.80 | | FIBROBLAST GROWTH | GROWTH FACTOR/GROWTH FACTOR | |
| | | | | | | | | | FACTOR 2; CHAIN: A, B; | RECEPTOR FGF, FGFR, | |
| | | | | | | | | | FIBROBLAST GROWTH | IMMUNOGLOBULIN-LIKE, SIGNAL | |
| | | | | | | | | | FACTOR RECEPTOR 1; CHAIN: | TRANSDUCTION, 2 DIMERIZATION, | |
| | | | | | | | | | C, D; | GROWTH FACTOR/GROWTH FACTOR | |
| | | | | | | | | | | RECEPTOR | |
| 214 | 1cys | D | 6 | 167 | 2.8e−20 | −0.26 | 0.06 | | FIBROBLAST GROWTH | GROWTH FACTOR/GROWTH FACTOR | |
| | | | | | | | | | FACTOR 2; CHAIN: A, B; | RECEPTOR FGF, FGFR, | |
| | | | | | | | | | FIBROBLAST GROWTH | IMMUNOGLOBULIN-LIKE SIGNAL | |
| | | | | | | | | | FACTOR RECEPTOR 1; CHAIN: | TRANSDUCTION, 2 DIMERIZATION, | |
| | | | | | | | | | C, D; | GROWTH FACTOR/GROWTH FACTOR | |
| | | | | | | | | | | RECEPTOR | |
| 214 | 1d5i | L | 70 | 269 | 4.2e−21 | | | 72.82 | CHIMERIC GERMLINE | IMMUNE SYSTEM IMMUNE SYSTEM | |
| | | | | | | | | | PRECURSOR OF OXY-COPE | | |
| | | | | | | | | | CHAIN: L; CHIMERIC | | |
| | | | | | | | | | GERMLINE PRECURSOR OF | | |
| | | | | | | | | | OXY-COPE CHAIN: H; | | |
| 214 | 1dfb− | L | 70 | 269 | 8.4e−22 | | | 75.44 | IMMUNOGLOBULIN 3D6 FAB | | |
| | | | | | | | | | 1DFB3 | | |
| 214 | 1dfb | L | 76 | 267 | 8.4e−22 | 0.36 | 0.99 | | IMMUNOGLOBULIN 3D6 FAB | | |
| | | | | | | | | | 1DFB3 | | |
| 214 | 1dgi | R | 58 | 362 | 3.4e−51 | | | 111.26 | POLIOVIRUS RECEPTOR; | VIRUS/VIRAL PROTEIN, RECEPTOR | |
| | | | | | | | | | CHAIN: R; VP1; CHAIN: 1; VP2; | CD155, PVR, HUMAN POLIOVIRUS, | |
| | | | | | | | | | CHAIN: 2; VP3; CHAIN: 3; VP4; | ELECTRON MICROSCOPY, 2 | |
| | | | | | | | | | CHAIN: 4; | POLIOVIRUS-RECEPTOR COMPLEX, | |
| | | | | | | | | | | VIRUS/VIRAL PROTEIN, RECEPTOR | |
| 214 | 1dgi | R | 75 | 362 | 3.4e−51 | −0.21 | 0.46 | | POLIOVIRUS RECEPTOR; | VIRUS/VIRAL PROTEIN, RECEPTOR | |
| | | | | | | | | | CHAIN: R; VP1; CHAIN: 1; VP2; | CD155, PVR, HUMAN POLIOVIRUS, | |
| | | | | | | | | | CHAIN: 2; VP3; CHAIN: 3; VP4; | ELECTRON MICROSCOPY, 2 | |
| | | | | | | | | | CHAIN: 4; | POLIOVIRUS-RECEPTOR COMPLEX, | |
| | | | | | | | | | | VIRUS/VIRAL PROTEIN, RECEPTOR | |
| 214 | 1dgi | R | 76 | 362 | 1.4e−39 | −0.02 | 0.06 | | POLIOVIRUS RECEPTOR; | VIRUS/VIRAL PROTEIN, RECEPTOR | |
| | | | | | | | | | CHAIN: R; VPI; CHAIN: I; VP2; | CD155, PVR, HUMAN POLIOVIRUS, | |
| | | | | | | | | | CHAIN: 2; VP3; CHAIN: 3; VP4; | ELECTRON MICROSCOPY, 2 | |
| | | | | | | | | | CHAIN: 4; | POLIOVIRUS-RECEPTOR COMPLEX, | |
| | | | | | | | | | | VIRUS/VIRAL PROTEIN, RECEPTOR | |
| 214 | 1epf | A | 165 | 352 | 1.7e−28 | 0.36 | 0.55 | | NEURAL CELL ADHESION | CELL ADHESION NCAM; NCAM, | |
| | | | | | | | | | MOLECULE; CHAIN: A, B, C, D; | IMMUNOGLOBULIN FOLD, | |
| | | | | | | | | | | GLYCOPROTEIN | |
| 214 | 1epf | A | 175 | 346 | 2.8e−19 | 0.37 | 0.94 | | NEURAL CELL ADHESION | CELL ADHESION NCAM; NCAM, | |
| | | | | | | | | | MOLECULE; CHAIN: A, B, C, D; | IMMUNOGLOBULIN FOLD, | |
| | | | | | | | | | | GLYCOPROTEIN | |
| 214 | 1epf | A | 3 | 152 | 2.8e−15 | −0.07 | 0.00 | | NEURAL CELL ADHESION | CELL ADHESION NCAM; NCAM, | |
| | | | | | | | | | MOLECULE; CHAIN: A, B, C, D; | IMMUNOGLOBULIN FOLD, | |
| | | | | | | | | | | GLYCOPROTEIN | |
| 214 | 1epf | A | 72 | 272 | 4.2e−24 | −0.00 | 0.16 | | NEURAL CELL ADHESION | CELL ADHESION NCAM; NCAM, | |
| | | | | | | | | | MOLECULE; CHAIN: A, B, C, D; | IMMUNOGLOBULIN FOLD, | |
| | | | | | | | | | | GLYCOPROTEIN | |
| 214 | 1ev2 | E | 170 | 362 | 2.8e−34 | 0.04 | 0.23 | | FIBROBLAST GROWTH | GROWTH FACTORIGROWTH FACTOR | |
| | | | | | | | | | FACTOR 2; CHAIN: A, B, C, D; | RECEPTOR FGF2; FGF2; | |
| | | | | | | | | | FIBROBLAST GROWTH | IMMUNOGLOBULIN (IG) LIKE | |
| | | | | | | | | | FACTOR RECEPTOR 2; CHAIN: | DOMAINS BELONGING TO THE I-SET | |
| | | | | | | | | | E, F, G, H; | 2 SUBGROUP WITHIN IG-LIKE | |
| | | | | | | | | | | DOMAINS, B-TREFOIL FOLD | |
| 214 | 1ev2 | G | 170 | 366 | 4.2e−37 | 0.03 | 0.70 | | FIBROBLAST GROWTH | GROWTH FACTORIGROWTH FACTOR | |
| | | | | | | | | | FACTOR 2; CHAIN: A, B, C, D; | RECEPTOR FGF2; FGF2; | |
| | | | | | | | | | FIBROBLAST GROWTH | IMMUNOGLOBULIN (IG) LIKE | |
| | | | | | | | | | FACTOR RECEPTOR 2; CHAIN: | DOMAINS BELONGING TO THE I-SET | |
| | | | | | | | | | E, F, G, H; | 2 SUBGROUP WITHIN IG-LIKE | |
| | | | | | | | | | | DOMAINS, B-TREFOIL FOLD | |
| 214 | 1evt | C | 169 | 362 | 2.8e−39 | 0.03 | 0.51 | | FIBROBLAST GROWTH | GROWTH FACTOR/GROWTH FACTOR | |
| | | | | | | | | | FACTOR 1; CHAIN: A, B; | RECEPTOR FGF1; FGFR1; | |
| | | | | | | | | | FIBROBLAST GROWTH | IMMUNOGLOBULIN (IG) LIKE | |
| | | | | | | | | | FACTOR RECEPTOR 1; CHAIN: | DOMAINS BELONGING TO THE I-SET | |
| | | | | | | | | | C, D; | 2 SUBGROUP WITHIN IG-LIKE | |
| | | | | | | | | | | DOMAINS, B-TREFOIL FOLD | |
| 214 | 1f2q | A | 26 | 171 | 2.8e−12 | −0.13 | 0.07 | | HIGH AFFINITY | IMMUNE SYSTEM FC-EPSILON RI- | |
| | | | | | | | | | IMMUNOGLOBULIN EPSILON | ALPHA; IMMUNOGLOBULIN FOLD, | |
| | | | | | | | | | RECEPTOR CHAIN: A; | GLYCOPROTEIN, RECEPTOR, IGB- | |
| | | | | | | | | | | BINDING 2 PROTEIN | |
| 214 | 1f6a | A | 166 | 365 | 3.4e−27 | 0.26 | 0.18 | | HIGH AFFINITY | IMMUNE SYSTEM HIGH AFFINITY | |
| | | | | | | | | | IMMUNOGLOBULIN EPSILON | IGE-FC RECEPTOR, FC(EPSILON) IGE- | |
| | | | | | | | | | RECEPTOR CHAIN: A; IG | FC; IMMUNOGLOBULIN FOLD, | |
| | | | | | | | | | EPSiLON CHAIN C REGION; | GLYCOPROTEIN, RECEPTOR, IGE- | |
| | | | | | | | | | CHAIN: B, D; | BINDING 2 PROTEIN, IGE ANTIBODY, | |
| | | | | | | | | | | IGE-FC | |
| 214 | 1f6a | A | 171 | 346 | 1.4e−14 | 0.40 | 0.99 | | HIGH AFFINITY | IMMUNE SYSTEM HIGH AFFINITY | |
| | | | | | | | | | IMMUNOGLOBULIN EPSILON | IGE-FC RECEPTOR, FC(EPSILON) IGE | |
| | | | | | | | | | RECEPTOR CHAIN: A; IG | FC; IMMUNOGLOBULIN FOLD, | |
| | | | | | | | | | EPSILON CHAIN C REGION; | GLYCOPROTEIN, RECEPTOR, IGE | |
| | | | | | | | | | CHAIN: B, D; | BINDING 2 PROTEIN, IGE ANTIBODY, | |
| | | | | | | | | | | IGE-EC | |
| 214 | 1f97 | A | 181 | 362 | 5.1e−26 | 0.27 | 0.11 | | JUNCTION ADHESION | CELL ADHESION IMMUNOGLOBULIN | |
| | | | | | | | | | MOLECULE; CHAIN: A; | SUPERFAMILY, BETA-SANDWICH | |
| | | | | | | | | | | FOLD | |
| 214 | 1f97 | A | 5 | 158 | 2.8e−12 | −0.05 | 0.09 | | JUNCTION ADHESION | CELL ADHESION IMMUNOGLOBULIN | |
| | | | | | | | | | MOLECULE; CHAIN: A; | SUPERFAMILY, BETA-SANDWICH | |
| | | | | | | | | | | FOLD | |
| 214 | 1f97 | A | 77 | 265 | 4.2e−30 | 0.09 | 0.86 | | JUNCTION ADHESION | CELL ADHESION IMMUNOGLOBULIN | |
| | | | | | | | | | MOLECULE; CHAIN: A; | SUPERFAMILY, BETA-SANDWICH | |
| | | | | | | | | | | FOLD | |
| 214 | 1fcg | A | 170 | 362 | 8.5e−28 | 0.14 | 0.39 | | FC RECEPTOR | IMMUNE SYSTEM, MEMBRANE | |
| | | | | | | | | | FC(GAMMA)RIIA; CHAIN: A; | PROTEIN CD32; FC RECEPTOR, | |
| | | | | | | | | | | IMMUNOGLOULIN, LEUKOCYTE, | |
| | | | | | | | | | | CD32 | |
| 214 | 1fhg | A | 272 | 362 | 1.5e−17 | 0.48 | 0.74 | | TELOKIN; CHAIN: A | CONTRACTILE PROTEIN | |
| | | | | | | | | | | IMMUNOGLOBULIN FOLD, BETA | |
| | | | | | | | | | | BARREL | |
| 214 | 1fhg | A | 275 | 362 | 2.8e−17 | 0.38 | 0.72 | | TELOKIN; CHAIN: A | CONTRACTILE PROTEIN | |
| | | | | | | | | | | IMMUNOGLOBULIN FOLD, BETA | |
| | | | | | | | | | | BARREL | |
| 214 | 1fhg | A | 78 | 167 | 5.6e−13 | 0.02 | 0.33 | | TELOKIN; CHAIN: A | CONTEACTILE PROTEIN | |
| | | | | | | | | | | IMMUNOGLOBULIN FOLD, BETA | |
| | | | | | | | | | | BARREL | |
| 214 | 1fnl | A | 167 | 362 | 3.4e−26 | 0.21 | 0.01 | | LOW AFFINITY | IMMUNE SYSTEM RECEPTOR BETA | |
| | | | | | | | | | IMMUNOGLOBULIN GAMMA | SANDWICH, IMMUNOGLOBULIN- | |
| | | | | | | | | | FC REGION CHAIN: A; | LIKE, RECEPTOR | |
| 214 | 1fnl | A | 273 | 375 | 1.7e−16 | 0.34 | −0.06 | | LOW AFFINITY | IMMUNE SYSTEM RECEPTOR BETA | |
| | | | | | | | | | IMMUNOGLOBULIN GAMMA | SANDWICH, IMMUNOGLOBULIN- | |
| | | | | | | | | | PC REGION CHAIN: A; | LIKE, RECEPTOR | |
| 214 | 1g0x | A | 167 | 356 | 6.8e−24 | 0.23 | 0.05 | | LEUCOCYTE | IMMUNE SYSTEM LEUKOCYTE | |
| | | | | | | | | | IMMUNOGLOBULIN-LIKE | INHIBITORY RECEPTOR-1; | |
| | | | | | | | | | RECEPTOR-1; CHAIN: A; | LEUKOCYTE IMMUNOGLOBULIN | |
| | | | | | | | | | | FOLD, 3-10 HELIX | |
| 214 | 1iai | L | 83 | 267 | 9.8e−15 | 0.12 | 0.27 | | IDIOTYPIC FAB 730.1.4 (IGG1) | COMPLEX (IMMUNOGLOBULIN | |
| | | | | | | | | | OF VIRUS 1IAI 5 CHAIN: L, H; | IGG1/IGG2A) | |
| | | | | | | | | | 1IAI 7 ANTI-IDIOTYPIC FAB | | |
| | | | | | | | | | 409.5.3 (IGG2A); 1IAI9 CHAIN: | | |
| | | | | | | | | | M, I 1IAI 10 | | |
| 214 | 1ie5 | A | 269 | 362 | 8.4e−18 | −0.11 | 0.45 | | NEURAL CELL ADHESION | CELL ADHESION N-CAM; | |
| | | | | | | | | | MOLECULE; CHAIN: A; | INTERMEDIATE IMMUNOGLOBULIN | |
| | | | | | | | | | | FOLD | |
| 214 | 1ie5 | A | 272 | 363 | 6.8e−18 | 0.01 | 0.51 | | NEURAL CELL ADHESION | CELL ADHESION N-CAM; | |
| | | | | | | | | | MOLECULE; CHAIN: A; | INTERMEDIATE IMMUNOGLOBULIN | |
| | | | | | | | | | | FOLD | |
| 214 | 1iil | G | 164 | 366 | 6.8e−27 | 0.24 | 0.46 | | HEPARIN-BINDING GROWTH | GROWTH FACTOR/GROWTH FACTOR | |
| | | | | | | | | | FACTOR 2; CHAIN: A, B, C, D; | RECEPTOR FGF2, HBGF-2, BASIC | |
| | | | | | | | | | FIBROBLAST GROWTH | FIBROBLAST GROWTH FACTOR, | |
| | | | | | | | | | FACTOR RECEPTOR 2; CHAIN: | FGFR2, KERATINOCYTE GROWTH | |
| | | | | | | | | | B, F, G, H; | FACTOR RECEPTOR; | |
| | | | | | | | | | | IMMUNOGLOBULIN LIKE DOMAIN, B- | |
| | | | | | | | | | | TREFOIL | |
| 214 | 1iil | G | 170 | 366 | 1.4e−36 | 0.38 | 0.53 | | HEPARIN-BINDING GROWTH | GROWTH FACTOR/GROWTH FACTOR | |
| | | | | | | | | | FACTOR 2; CHAIN: A, B, C, D; | RECEPTOR FGF2, HBGF-2, BASIC | |
| | | | | | | | | | FIBROBLAST GROWTH | FIBROBLAST GROWTH FACTOR, | |
| | | | | | | | | | FACTOR RECEPTOR 2; CHAIN: | FGFR2, KERATINOCYTE GROWTH | |
| | | | | | | | | | B, F, G, H; | FACTOR RECEPTOR; | |
| | | | | | | | | | | IMMUNOGLOBULIN LIKE DOMAIN, B- | |
| | | | | | | | | | | TREFOIL | |
| 214 | 1iil | G | 275 | 365 | 1.5e−16 | 0.61 | 0.55 | | HEPARIN-BINDING GROWTH | GROWTH FACTOR/GROWTH FACTOR | |
| | | | | | | | | | FACTOR 2; CHAIN: A, B, C, D; | RECEPTOR FGF2, HBGF-2, BASIC | |
| | | | | | | | | | FIBROBLAST GROWTH | FIBROBLAST GROWTH FACTOR, | |
| | | | | | | | | | FACTOR RECEPTOR 2; CHAIN: | FGFR2, KERATINOCYTE GROWTH | |
| | | | | | | | | | B, F, G, H; | FACTOR RECEPTOR; | |
| | | | | | | | | | | IMMUNOGLOBULIN LIKE DOMAIN, B- | |
| | | | | | | | | | | TREFOIL | |
| 214 | 1itb | B | 79 | 366 | 3.4e−37 | | | 82.33 | INTERLEUKIN-1 BETA; CHAIN: | COMPLEX | |
| | | | | | | | | | A; TYPE 1 TNTERLEUKIN-1 | (IMMUNOGLOBULIN/RECEPTOR) | |
| | | | | | | | | | RECEPTOR; CHAIN: B; | IMMUNOGLOBULIN FOLD, | |
| | | | | | | | | | | TRANSMEMBRANE, GLYCOPROTEIN | |
| | | | | | | | | | | RECEPTOR, 2 SIGNAL, COMPLEX | |
| | | | | | | | | | | (IMMUNOGLOBULIN/RECEPTOR) | |
| 214 | 1mco | H | 1 | 363 | 9.8e−19 | | | 78.42 | IMMUNOGLOBULIN | | |
| | | | | | | | | | IMMUNOGLOBULIN G1 (IGG1) | | |
| | | | | | | | | | (MCG) WITH A HINGE | | |
| | | | | | | | | | DELETION 1MCO 3 | | |
| 214 | 1nfd | E | 74 | 267 | 1.1e−21 | 0.32 | 0.96 | | N15 ALPHA-BETA T-CELL | COMPLEX | |
| | | | | | | | | | RECEPTOR; CHAIN: A, B, C, D; | (IMMUNORECEPTOR/IMMUNOGLOBU | |
| | | | | | | | | | H57 FAB; CHAIN: B, F, G, H | LIN) COMPLEX | |
| | | | | | | | | | | (IMMUNORECEPTOR/IMMUNOGLOBU | |
| | | | | | | | | | | LIN) | |
| 214 | 1osp | L | 70 | 269 | 1.1e−17 | | | 75.72 | FAD 184.1; CHAIN: L, H; OUTER | COMPLEX | |
| | | | | | | | | | SURFACE PROTEIN A; CHAIN: | (IMMUNOGLOBULIN/LIPOPROTEIN) | |
| | | | | | | | | | O; | OSPA; COMPLEX | |
| | | | | | | | | | N | | (IMMUNOGLOBULIN/LIPOPROTEIN), |
| | | | | | | | | | | OUTER SURFACE 2 PROTEIN A | |
| | | | | | | | | | | COMPLEXED WITH FAD 184.1, | |
| | | | | | | | | | | BORRELIA BURGDORFERI 3 STRAIN | |
| | | | | | | | | | | B31 | |
| 214 | 1vca | A | 73 | 278 | 8.5e−27 | 0.57 | 0.93 | | HUMAN VASCULAR CELL | CELL ADHESION PROTEIN VCAM- | |
| | | | | | | | | | ADHESION MOLECULE-1; 1VCA | D1, 2; 1VCA 6 IMMUNOGLOBULIN | |
| | | | | | | | | | 4 CHAIN: A, B; 1VCA 5 | SUPERFAMILY, INTEGRIN-BINDING | |
| | | | | | | | | | | 1YCA 15 | |
| 214 | 1wio | A | 76 | 442 | 1.5e−35 | | | 89.83 | T-CELL SURFACE | GLYCOPROTEIN CD4; | |
| | | | | | | | | | GLYCOPROTEIN CD4; CHAIN: | IMMUNOGLOBULIN FOLD, | |
| | | | | | | | | | A, B; | TRANSMEMBRANE, GLYCOPROTEIN, | |
| | | | | | | | | | | T-CELL, 2 MHC LIPOPROTEIN, | |
| | | | | | | | | | | POLYMORPHISM | |
| 214 | 2dli | A | 167 | 354 | 8.5e−23 | 0.17 | 0.00 | | MHC CLASS INK CELL | IMMUNE SYSTEM P58 NATURAL | |
| | | | | | | | | | RECEPTOR PRECURSOR; | KILLER CELL RECEPTOR; KIR, | |
| | | | | | | | | | CHAIN: A; | NATURAL KILLER RECEPTOR, | |
| | | | | | | | | | | INHIBITORY RECEPTOR, 2 | |
| | | | | | | | | | | IMMUNOGLOBULIN | |
| 214 | 2fcb | A | 170 | 365 | 1.5e−27 | −0.16 | 0.75 | | FC GAMMA RIIB; CHAIN: A; | IMMUNE SYSTEM CD32; RECEPTOR, | |
| | | | | | | | | | | FC, CD32, IMMUNE SYSTEM | |
| 214 | 2fcb | A | 278 | 375 | 1.5e−16 | 0.17 | 0.03 | | FC GAMMA RIIB; CHAIN: A; | IMMUNE SYSTEM CD32; RECEPTOR, | |
| | | | | | | | | | | FC, CD32, IMMUNE SYSTEM | |
| 214 | 2fgw | L | 76 | 267 | 1.1e−21 | 0.30 | 0.99 | | IMMUNOGLOBULIN FAB | | |
| | | | | | | | | | FRAGMENT OF A HUMANIZED | | |
| | | | | | | | | | VERSION OF ThE ANTI-CD18 | | |
| | | | | | | | | | 2FGW 3 ANTIBODY ′h52′ | | |
| | | | | | | | | | (HUH52-OZ FAJ3) 2FGW 4 | | |
| 214 | 2ncm | | 282 | 363 | 1.5e−17 | 0.42 | 0.29 | | NEURAL CELL ADHESION | CELL ADHESION NCAM DOMAIN 1; | |
| | | | | | | | | | MOLECULE; CHAIN: NULL; | CELL ADHESION, GLYCOPROTEIN, | |
| | | | | | | | | | | HEPARIN-BINDING, GPI-ANCHOR, 2 | |
| | | | | | | | | | | NEURAL ADHESION MOLECULE, | |
| | | | | | | | | | | IMMUNOGLOBULIN FOLD, SIGNAL | |
| 214 | 3fct | A | 73 | 269 | 1.4e−20 | | | 77.03 | METAL CHELATASE | IMMUNE SYSTEM METAL | |
| | | | | | | | | | CATALYTIC ANTIBODY; | CHELATASE, CATALYTIC ANTIBODY, | |
| | | | | | | | | | CHAIN: A, C; METAL | FAB FRAGMENT, IMMUNE 2 SYSTEM | |
| | | | | | | | | | CHELATASE CATALYTIC | | |
| | | | | | | | | | ANTIBODY; CHAIN: B, D; | | |
| 214 | 8fab | A | 73 | 268 | 5.6e−23 | | | 74.31 | IMMUNOGLOBULIN FAB | | |
| | | | | | | | | | FRAGMENT FROM HUMAN | | |
| | | | | | | | | | IMMUNOGLOBULIN IGG1 | | |
| | | | | | | | | | (LAMBDA, HIL) 8FAB 3 | | |
| 214 | 8fab | A | 75 | 258 | 5.6e−23 | 0.42 | 1.00 | | IMMUNOGLOBULIN FAB | | |
| | | | | | | | | | FRAGMENT FROM HUMAN | | |
| | | | | | | | | | IMMUNOGLOBULIN IGG1 | | |
| | | | | | | | | | (LAMBDA, HIL) 8FAB 3 | | |
| 215 | 1b3u | A | 22 | 571 | 4.5e−18 | 0.11 | −1202.08 | | PROTEIN PHOSPHATASE PP2A; | SCAFFOLD PROTEIN SCAFFOLD | |
| | | | | | | | | | CHAIN: A, B; | PROTEIN, PP2A, PHOSPHORYLATION, | |
| | | | | | | | | | | HEAT REPEAT | |
| 215 | 1ee4 | A | 389 | 777 | 4.5e−21 | 0.35 | −1202.08 | | KARYOPHERIN ALPHA; CHAIN: | TRANSPORT PROTEIN SHRINE-RICH | |
| | | | | | | | | | A, B; MYC PROTO-ONCOGENE | RNA POLYMERASE I SUPPRESSOR | |
| | | | | | | | | | PROTEIN; CHAIN: C, D, E, F; | PROTEIN; ARM REPEAT | |
| 215 | 1g3j | C | 462 | 799 | 3e−15 | 0.02 | −1202.08 | | BETA-CATENIN ARMADILLO | TRANSCRIPTION BETA- | |
| | | | | | | | | | REPEAT REGION; CHAIN: A, C; | CATENIN,TCF-3, PROTEIN-PROTEIN | |
| | | | | | | | | | TCF3-CBD (CATENIN BINDING | COMPLEX | |
| | | | | | | | | | DOMAIN); CHAIN: B, D; | | |
| 215 | 1i7w | A | 462 | 915 | 1.5e−21 | 0.09 | −1202.08 | | BETA-CATENIN; CHAIN: A, C; | CELL ADHESION E-CADHERIN; E- | |
| | | | | | | | | | EPITHELIAL-CADHERlN; | CADHERIN, CELL ADHESION, BETA- | |
| | | | | | | | | | CHAIN: B, D; | CATENIN, PROTEIN-PROTEIN 2 | |
| | | | | | | | | | | COMPLEX, EXTENDED INTERFACE, | |
| | | | | | | | | | | ARMADILLO REPEAT, | |
| | | | | | | | | | | PHOSPHOSERINE | |
| 215 | 1ial | A | 456 | 901 | 1.5e−18 | 0.14 | −1202.08 | | IMPORTIN ALPHA; CHAIN: A; | NUCLEAR IMPORT RECEPTOR | |
| | | | | | | | | | | KARYOPHERIN ALPHA; NUCLEAR | |
| | | | | | | | | | | IMPORT RECEPTOR, NUCLEAR | |
| | | | | | | | | | | LOCALIZATION SIGNAL, 2 | |
| | | | | | | | | | | ARMADILLO REPEATS, | |
| | | | | | | | | | | AUTOINHIBITION, INTRASTERIC | |
| | | | | | | | | | | REGULATION | |
| 215 | 3bct | | 412 | 787 | 6e−17 | 0.11 | −1202.08 | | BETA-CATENIN; CHAIN: NULL; | ARMADILLO REPEAT ARMADILLO | |
| | | | | | | | | | | REPEAT, BETA-CATENIN, | |
| | | | | | | | | | | CYTOSKELETON | |
| 216 | 1a7q | L | 27 | 132 | 0.00012 | | | 60.18 | MONOCLONAL ANTIBODY | IMMUNOGLOBULIN | |
| | | | | | | | | | D1.3; CHAIN: L, H; | IMMUNOGLOBULIN, VARIANT | |
| 216 | 1aif | A | 27 | 211 | 0.0015 | | | 61.80 | ANTI-IDIOTYPIC FAB 409.5.3 | IMMUNOGLOBULIN | |
| | | | | | | | | | (IGG2A) FAB; CHAIN: A, B, L, H | IMMUNOGLOBULIN, C REGION, V | |
| | | | | | | | | | | REGION | |
| 216 | 1bww | A | 25 | 133 | 0.00045 | | | 61.39 | IG KAPPA CHAIN V-I REGION | IMMUNE SYSTEM REIV, STABILIZED | |
| | | | | | | | | | REI; CHAIN: A, B; | IMMUNOGLOBULIN FRAGMENT, | |
| | | | | | | | | | | BENCE-JONES 2 PROTEIN, IMMUNE | |
| | | | | | | | | | | SYSTEM | |
| 216 | 1cdy | | 35 | 136 | 1.5e−09 | 0.41 | −1202.08 | | T-CELL SURFACE | T-CELL SURFACE GLYCOPROTEIN | |
| | | | | | | | | | GLYCOPROTEIN CD4; CHAIN: | IMMUNOGLOBULIN FOLD, | |
| | | | | | | | | | NULL; | TRANSMEMBRANE, GLYCOPROTEIN, | |
| | | | | | | | | | | T-CELL, 2 MHC, LIPOPROTEIN, T- | |
| | | | | | | | | | | CELL SURFACE GLYCOPROTEIN | |
| 216 | 1cs6 | A | 26 | 159 | 6e−08 | 0.25 | −1202.08 | AXONIN-1; CHAIN: A; | CELL ADHESION NEURAL CELL | | |
| | | | | | | | | | | ADHESION | |
| 216 | 1cvs | C | 9 | 112 | 1.5e−11 | 0.04 | −1202.08 | | FIBROBLAST GROWTH | GROWTH FACTOR/GROWTH FACTOR | |
| | | | | | | | | | FACTOR 2; CHAIN: A, B; | RECEPTOR FGF, FGFR, | |
| | | | | | | | | | FIBROBLAST GROWTH | IMMUNOGLOBULIN-LIKE, SIGNAL | |
| | | | | | | | | | FACTOR RECEPTOR 1; CHAIN: | TRANSDUCTION, 2 DIMERIZATION, | |
| | | | | | | | | | C, D; | GROWTH FACTOR/GROWTH FACTOR | |
| | | | | | | | | | | RECEPTOR | |
| 216 | 1dr9 | A | 37 | 134 | 4.5e−08 | 0.35 | −1202.08 | | TLYMPHOCYTE ACTIVATION | IMMUNE SYSTEM B7-1 (CD80); IG | |
| | | | | | | | | | ANTIGEN; CHAIN: A; | SUPERFAMILY | |
| 216 | 1eaj | A | 28 | 132 | 7.5e−1 1 | 0.41 | −1202.08 | | COXSACKIE VIRUS AND | VIRUS/VIRAL PROTEIN RECEPTOR | |
| | | | | | | | | | ADENOVIRUS RECEPTOR; | COXSACKIEVIRUS B-ADENOVIRUS | |
| | | | | | | | | | CHAIN: A, B; | RECEPTOR, HCAR, VIRUS/VIRAL | |
| | | | | | | | | | | PROTEIN RECEPTOR, | |
| | | | | | | | | | | IMMUNOGLOBULIN V DOMAIN | |
| | | | | | | | | | | FOLD, 2 SYMMETRIC DIMER | |
| 216 | 1epf | A | 31 | 112 | 6e−10 | 0.47 | −1202.08 | | NEURAL CELL ADHESION | CELL ADHESION NCAM; NCAM, | |
| | | | | | | | | | MOLECULE; CHAIN: A, B, C, D; | IMMUNOGLOBULIN FOLD, | |
| | | | | | | | | | | GLYCOPROTEIN | |
| 216 | 1f97 | A | 30 | 112 | 1.5e−10 | 0.12 | −1202.08 | | JUNCTION ADHESION | CELL ADHESION IMMUNOGLOBULIN | |
| | | | | | | | | | MOLECULE; CHAIN: A; | SUPERFAMILY, BETA-SANDWICH | |
| | | | | | | | | | | FOLD | |
| 216 | 1g9m | L | 27 | 210 | 3e−06 | | | 61.27 | ENVELOPE GLYCOPROTEIN | VIRUS/VIRAL PROTEIN COMPLEX | |
| | | | | | | | | | GP120; CHAIN: G; T-CELL | (HIV ENVELOPE PROTEIN/CD4/FAB), | |
| | | | | | | | | | SURFACE GLYCOPROTEIN | HIV-1 EXTERIOR 2 ENVELOPE GPI2O | |
| | | | | | | | | | CD4; CHAIN: C; ANTIBODY 17B, | FROM LABORATORY-ADAPTED | |
| | | | | | | | | | LIGHT CHAIN; CHAIN: L; | ISOLATE, HXBC2, 3 SURFACE T-CELL | |
| | | | | | | | | | ANTIBODY 17B, HEAVY | GLYCOPROTEIN CD4, ANTIGEN- | |
| | | | | | | | | | CHAIN; CHAIN: H; | BINDING FRAGMENT 4 OF HUMAN | |
| | | | | | | | | | | IMMUNOGLOBULIIN 17B | |
| 216 | 1hxm | B | 32 | 142 | 6e−10 | 0.32 | −1202.08 | | GAMMA-DELTA T-CELL | IMMUNE SYSTEM T-CELL RECEPTOR | |
| | | | | | | | | | RECEPTOR; CHAIN: A, C, B, G; | DELTA CHAIN; T-CELL RECEPTOR | |
| | | | | | | | | | GAMMA-DELTA T-CELL | GAMMA CHAIN; IG DOMAIN, T CELL | |
| | | | | | | | | | RECEPTOR; CHAIN: B, D, F, H; | RECEPTOR, TCR, GDTCR | |
| 216 | 1igm | L | 27 | 140 | 7.5e−05 | | | 60.22 | IMMUNOGLOBULIN | | |
| | | | | | | | | | IMMUNOGLOBULIN M (IG-M) | | |
| | | | | | | | | | FV FRAGMENT 1IGM 3 | | |
| 216 | 1neu | | 31 | 132 | 1.2e−09 | 0.36 | −1202.08 | | MYBLIN P0 PROTEIN; CHAIN: | STRUCTURAL PROTEIN MYBLIN, | |
| | | | | | | | | | NULL; | STRUCTURAL PROTEIN, | |
| | | | | | | | | | | GLYCOPROTEIN, TRANSMEMBRANE, | |
| | | | | | | | | | | PHOSPHORYLATION, | |
| | | | | | | | | | | IMMUNOGLOBULIN FOLD, SIGNAL, | |
| | | | | | | | | | | MYBLIN 2 MEMBRANE ADHESION | |
| | | | | | | | | | | MOLECULE | |
| 216 | 1nkr | | 29 | 148 | 1.5e−09 | 0.16 | −1202.08 | | P58-CL42 KIR; CHAIN: NULL; | INHIBITORY RECEPTOR KILLER CELL | |
| | | | | | | | | | | INHIBITORY RECEPTOR; INHIBITORY | |
| | | | | | | | | | | RECEPTOR, NATURAL KILLER CELLS, | |
| | | | | | | | | | | IMMUNOLOGICAL 2 RECEPTORS, | |
| | | | | | | | | | | IMMUNOGLOBULIN FOLD | |
| 216 | 1vca | A | 31 | 134 | 1.5e−10 | 0.22 | −1202.08 | | HUMAN VASCULAR CELL | CELL ADHESION PROTEIN VCAM | |
| | | | | | | | | | ADHESION MOLECULE-1; 1VCA | D1, 2; 1VCA 6 IMMUNOGLOBULIN | |
| | | | | | | | | | 4 CHAIN: A, B; IVCA 5 | SUPERFAMILY, INTEGRIN-BINDING | |
| | | | | | | | | | | IVCA 15 | |
| 220 | 1a25 | A | 648 | 768 | 1.4e−17 | 0.24 | −1202.08 | | PROTEIN KINASE C (BETA); | CALCIUM-BINDING PROTEIN CALB; | |
| | | | | | | | | | CHAIN: A, B; | CALCIUM++IPHOSPHOLIPID BINDING | |
| | | | | | | | | | | PROTEIN, 2 CALCIUM-BINDING | |
| | | | | | | | | | | PROTEIN | |
| 220 | 1a25− | A | 667 | 754 | 1.5e−18 | 0.08 | −1202.08 | | PROTEIN KINASE C (BETA); | CALCIUM-BINDING PROTEIN CALB; | |
| | | | | | | | | | CHAIN: A, B; | CALCIUM++IPHOSPHOLIPID BINDING | |
| | | | | | | | | | | PROTEIN, 2 CALCIUM-BINDING | |
| | | | | | | | | | | PROTEIN | |
| 220 | 1byn | A | 648 | 768 | 8.4e−23 | 0.21 | −1202.08 | | SYNAPTOTAGMIN I; CHAIN: A; | ENDOCYTOSIS/EXOCYTOSIS | |
| | | | | | | | | | | SYNAPTOTAGMIN, C2-DOMAIN, | |
| | | | | | | | | | | EXOCYTOSIS, NEUROTRANSMI~LTER | |
| | | | | | | | | | | 2 RELEASE, | |
| | | | | | | | | | | ENDOCYTOSIS/EXOCYTOSIS | |
| 220 | 1cjy | A | 666 | 786 | 1.4e−08 | 0.16 | −1202.08 | | CYTOSOLIC PHOSPHOLIPASE | HYDROLASE CPLA2; | |
| | | | | | | | | | A2; CHAIN: A, B; | PHOSPHOLIPASE, LIPID-BINDING, | |
| | | | | | | | | | | HYDROLASE | |
| 220 | 1djx | B | 845 | 1047 | 2.8e−12 | 0.01 | −1202.08 | | PHOSPHOINOSITIDE-SPECIHC | LIPID DEGRADATION PLC-D1; | |
| | | | | | | | | | PHOSPHOLIPASE C, CHAIN: A, | PHOSPHORIC DIESTER HYDROLASE, | |
| | | | | | | | | | B; | HYDROLASE, LIPID DEGRADATION, 2 | |
| | | | | | | | | | | TRANSDUCER, CALCIUM-BINDING, | |
| | | | | | | | | | | PHOSPHOLIPASE C, 3 | |
| | | | | | | | | | | PHOSPHOINOSITIDE-SPECIFIC | |
| 220 | 1dsy | A | 647 | 781 | 5.6e−21 | 0.23 | −1202.08 | | PROTEIN KINASE C, ALPHA | TRANSFERASE CALCIUM++, | |
| | | | | | | | | | TYPE; CHAIN: A; | PHOSPHOLIPID BINDING PROTEIN, | |
| | | | | | | | | | | CALCIUM-BINDING 2 PROTEIN, | |
| | | | | | | | | | | PHOSPHATIDYLSERINE, PROTEIN | |
| | | | | | | | | | | KINASE C | |
| 220 | 1rlw | | 664 | 754 | 4.5e−19 | 0.04 | −1202.08 | | PHOSPHOLIPASE A2; CHAIN: | HYDROLASE CALB DOMAIN; | |
| | | | | | | | | | NULL; | HYDROLASE, C2 DOMAIN, CALB | |
| | | | | | | | | | | DOMAIN | |
| 220 | 1rlw | | 666 | 765 | 2.8e−08 | 0.14 | −1202.08 | | PHOSPHOLIPASE A2; CHAIN: | HYDROLASE CALB DOMAIN; | |
| | | | | | | | | | NULL; | HYDROLASE, C2 DOMAIN, CALB | |
| | | | | | | | | | | DOMAIN | |
| 220 | 1rsy | | 619 | 754 | 3e−20 | 0.22 | −1202.08 | | CALCIUM/PHOSPHOLIPID | | |
| | | | | | | | | | BINDING PROTEIN | | |
| | | | | | | | | | SYNAPTOTAGMIN I (FIRST C2 | | |
| | | | | | | | | | DOMAIN) (CALB) IRSY 3 | | |
| 220 | 1rsy | | 648 | 768 | 8.4e−23 | 0.11 | −1202.08 | | CALCIUM/PHOSPHOLIPID | | |
| | | | | | | | | | BINDING PROTEIN | | |
| | | | | | | | | | SYNAPTOTAGMIN I (FIRST C2 | | |
| | | | | | | | | | DOMAIN) (CALB) lRSY 3 | | |
| 220 | 3rpb | A | 650 | 779 | 9.8e−17 | 0.29 | −1202.08 | RABPHILIN 3-A; CHAIN: A; | ENDOCYTOSIS/EXOCYTOSIS C2- | | |
| | | | | | | | | | | DOMAINS, C2B-DOMAIN, RABPHILIN, | |
| | | | | | | | | | | ENDOCYTOSIS/EXOCYTOSIS | |
| 222 | 1f88 | A | 54 | 378 | 1e−24 | | | 73.00 | RHODOPSIN; CHAIN: A, B | SIGNALING PROTEIN | |
| | | | | | | | | | | PHOTORECEPTOR, G PROTEIN- | |
| | | | | | | | | | | COUPLED RECEPTOR, MEMBRANE | |
| | | | | | | | | | | PROTEIN, 2 RETINAL PROTEIN, | |
| | | | | | | | | | | VISUAL PIGMENT | |
| 222 | 1f88 | B | 54 | 371 | 3e−18 | | | 70.57 | RHODOPSIN; CHAIN: A, B | SIGNALING PROTEIN | |
| | | | | | | | | | | PHOTORECEPTOR, G PROTEIN- | |
| | | | | | | | | | | COUPLED RECEPTOR, MEMBRANE | |
| | | | | | | | | | | PROTEIN, 2 RETINAL PROTEIN, | |
| | | | | | | | | | | VISUAL PIGMENT | |
| 222 | 1hMe | | 6 | 81 | 1.1 e−28 | | | 98.43 | DNA-BINDING HIGH MOBILITY | | |
| | | | | | | | | | GROUP PROTEIN FRAGMENT-B | | |
| | | | | | | | | | (HMGB) (DNA-BINDING 1HME 3 | | |
| | | | | | | | | | HMG-BOX DOMAIN B OF RAT | | |
| | | | | | | | | | HMG1) (NMR, 1STRUCTURE) | | |
| | | | | | | | | | 1HMB 4 | | |
| 222 | 1hsM | | 9 | 87 | 1.1e−26 | | | 97.62 | DNA-BINDING HIGH MOBILITY | | |
| | | | | | | | | | GROUP PROTEIN 1 (11MG 1) BOX | | |
| | | | | | | | | | 2, COMPLEXED WITH IUSM 3 | | |
| | | | | | | | | | MERCAPTOETHANOL (NMR, | | |
| | | | | | | | | | MINIMIZED AVERAGE | | |
| | | | | | | | | | STRUCTURE) 1HSM 4 | | |
| 223 | 1fx8 | A | 85 | 333 | 1.4e−47 | | | 73.96 | GLYCEROL UPTAKE | MEMBRANE PROTEIN GLPF; | |
| | | | | | | | | | FACILITATOR PROTEIN; | GLYCEROL-CONDUCTING | |
| | | | | | | | | | CHAIN: A; | MEMBRANE CHANNEL PROTEIN | |
| 227 | 1914 | | 1 | 104 | 9.8e−36 | | | 69.38 | SIGNAL RECOGNITION | ALU DOMAIN SRP9/14, ALU BM, RBD; | |
| | | | | | | | | | PARTICLE 9/14 FUSION | ALU DOMAIN, CRYSTAL | |
| | | | | | | | | | PROTEIN; CHAIN: NULL; | STRUCTURE, RNA BINDING, SIGNAL | |
| | | | | | | | | | | 2 RECOGNITION PARTICLE (SRP), | |
| | | | | | | | | | | TRANSLATION REGULATION | |
| 227 | 1dhp | A | 35 | 327 | 1.4e−91 | 0.66 | −1202.08 | | DIHYDRODIPICOLINATE | SYNTHASE DHDPS; SYNTHASE, | |
| | | | | | | | | | SYNTHASE; CHAIN: A, B; | DIHYDRODIPICOLINATE | |
| 227 | 1dhp | A | 35 | 327 | 1.4e−91 | | | 130.43 | DIHYDRODIPICOLINATE | SYNTHASE DHDPS; SYNTHASE, | |
| | | | | | | | | | SYNTHASE; CHAIN: A, B; | DIHYDRODIPICOLINATE | |
| 227 | 1f6k | A | 10 | 304 | 1.4e−69 | | | 123.19 | N-ACETYLNEURAMINATE | LYASE BETA BARREL, LYASE | |
| | | | | | | | | | LYASE; CHAIN: A, C; | | |
| 227 | 1f6k | A | 33 | 327 | 3e−76 | | | 123.09 | N-ACETYLNEURAMINATE | LYASE BETA BARREL, LYASE | |
| | | | | | | | | | LYASE; CHAIN: A, C; | | |
| 227 | 1f6k | A | 34 | 318 | 3e−76 | 0.52 | −1202.08 | | N-ACETYLNEURAMINATE | LYASE BETA BARREL, LYASE | |
| | | | | | | | | | LYASE; CHAIN: A, C; | | |
| 227 | 1f6k | A | 34 | 323 | 5.6e−69 | 0.44 | −1202.08 | | N-ACETYLNEURAMINATE | LYASE BETA BARREL, LYASE | |
| | | | | | | | | | LYASE; CHAIN: A, C; | | |
| 227 | 1nal | 1 | 11 | 300 | 7e−64 | | | 121.57 | N-ACETYLNEURAMINATE | LYASE | |
| | | | | | | | | | LYASE; 1NAL 4 CHAIN: | | |
| | | | | | | | | | 1, 2, 3, 4; INAL 5 | | |
| 227 | 1Nai | 1 | 34 | 318 | 4.5 e−75 | 0.66 | −1202.08 | | N-ACETYLNEURAMINATE | LYASE | |
| | | | | | | | | | LYASE; 1NAL 4 CHAIN: | | |
| | | | | | | | | | 1, 2, 3, 4; INAL 5 | | |
| 227 | 1nal | 1 | 34 | 319 | 1.4e−63 | 0.61 | −1202.08 | | N-ACETYLNEURAMINATE | LYASE | |
| | | | | | | | | | LYASE; iNAL 4 CHAIN: | | |
| | | | | | | | | | 1, 2, 3, 4; 1NAL 5 | | |
| 227 | 1nal | 1 | 34 | 323 | 4.5e−75 | | | 121.46 | N-ACETYLNEUIRAMINATE | LYASE | |
| | | | | | | | | | LYASE; LNAL4 CHAIN: | | |
| | | | | | | | | | 1, 2, 3, 4; 1NAL 5 | | |
| 229 | 1hci | A | 363 | 478 | 1.5e−08 | 0.04 | −1202.08 | | ALPHA-ACTININ 2; CHAIN: A, | TRIPLE-HELIX COILED COIL ALPHA | |
| | | | | | | | | | B; | ACTININ SKELETAL MUSCLE | |
| | | | | | | | | | | ISOFORM 2, TRIPLE-HELIX COILED | |
| | | | | | | | | | | COIL, CONTRACTILE PROTEIN, | |
| | | | | | | | | | | MUSCLE, 2 Z-LINE, ACTIN-BINDiNG | |
| | | | | | | | | | | PROTEIN | |
| 231 | 1dx5 | I | 176 | 284 | 1.4e−10 | 0.44 | −1202.8 | | THROMBIN LIGHT CHAIN; | SERINE PROTEINASE COAGULATION | |
| | | | | | | | | | CHAIN: A, B, C, D; THROMBIN | FACTOR II; COAGULATION FACTOR | |
| | | | | | | | | | HEAVY CHAIN; CHAIN: M, N, O, | II; FETOMODULIN, TM, CD141 | |
| | | | | | | | | | P; THROMBOMODULIN; CHAIN: | ANTIGEN; EOR-CMK SERINE | |
| | | | | | | | | | I, J, K, L; THROMBIN lNHIBITOR | PROTEINASE, EGF-LIKE DOMAINS, | |
| | | | | | | | | | L-GLU-L-GLY-L-ARM; CHAIN: | ANTICOAGULANT COMPLEX, 2 | |
| | | | | | | | | | E, F, G, H; | ANTIFIBRINOLYTIC COMPLEX | |
| 231 | 1Dx5 | I | 252 | 353 | 5.6e−14 | 0.33 | −1202.08 | | THROMBIN LIGHT CHAIN; | SERINE PROTEINASE COAGULATION | |
| | | | | | | | | | CHAIN: A, B, C, D; THROMBIN | FACTOR II; COAGULATION FACTOR | |
| | | | | | | | | | HEAVY CHAIN; CHAIN: M, N, O, | II; FETOMODULIN, TM, CD 141 | |
| | | | | | | | | | P; THROMBOMODULIN; CHAIN: | ANTIGEN; EGR-CMK SERINE | |
| | | | | | | | | | I, J, K, L; THROMBIN INHIBITOR | PROTEINASE, EGF-LIKE DOMAINS, | |
| | | | | | | | | | L-GLU-L-GLY-L-ARM; CHAIN: | ANTICOAGULANT COMPLEX, 2 | |
| | | | | | | | | | E, F, G, H; | ANTIFIBRINOLYTIC COMPLEX | |
| 231 | 1dx5 | I | 320 | 427 | 5.6e−12 | 0.33 | −1202.08 | | THROMBIN LIGHT CHAIN; | SERINE PROTEINASE COAGULATION | |
| | | | | | | | | | CHAIN: A, B, C, D; THROMBIN | FACTOR II; COAGULATION FACTOR | |
| | | | | | | | | | HEAVY CHAIN; CHAIN: M, N, O, | II; FETOMODULIN, TM, CDl4I | |
| | | | | | | | | | P; THROMBOMODULIN; CHAIN: | ANTIGEN; EGR-CMK SERINE | |
| | | | | | | | | | I, I, K, L; THROMBIN INHIBITOR | PROTEINASE, EGF-LIKE DOMAINS, | |
| | | | | | | | | | L-GLU-L-GLY-L-ARM; CHAIN: | ANTICOAGULANT COMPLEX, 2 | |
| | | | | | | | | | E, F, G, H; | ANTIHBRINOLYTIC COMPLEX | |
| 231 | 1hj7 | A | 214 | 288 | 1 .4e−09 | 0.33 | −1202.08 | | LDL RECEPTOR; CHAIN: A; | CELL-SURFACE RECEPTOR CELL- | |
| | | | | | | | | | | SURFACE RECEPTOR, CALCIUM- | |
| | | | | | | | | | | BINDING, EGF-LIKE DOMAIN, 2 | |
| | | | | | | | | | | MODULE, APO-E, APO-B, LDL, VLDL | |
| 231 | 1hj7 | A | 368 | 427 | 1.3e−09 | 0.02 | −1202.08 | | LDL RECEPTOR; CHAIN: A; | CELL-SURFACE RECEPTOR CELL- | |
| | | | | | | | | | | SURFACE RECEPTOR, CALCIUM- | |
| | | | | | | | | | | BINDING, EGF-LIKE DOMAIN, 2 | |
| | | | | | | | | | | MODULE, APO-E, APO-B, LDL, VLDL | |
| 231 | 1kLO | | 163 | 288 | 5.6e−09 | 0.18 | −1202.08 | | LAMININ; CHAIN: NULL; | GLYCOPROTEIN GLYCOPROTEIN | |
| 231 | 1pfx | L | 250 | 327 | 8.4e−09 | 0.09 | −1202.08 | | FACTOR IXA; CHAIN: C, L,; D- | COMPLEX (BLOOD | |
| | | | | | | | | | PHE-PRO-ARG; CHAIN: I; | COAGULATION/INHIBITOR) | |
| | | | | | | | | | | CHRISTMAS FACTOR; COMPLEX, | |
| | | | | | | | | | | INHIBITOR, HEMOPHILIAIEGF, | |
| | | | | | | | | | | BLOOD COAGULATION, 2 PLASMA, | |
| | | | | | | | | | | SERINE PROTEASE, CALCIUM- | |
| | | | | | | | | | | BINDING, HYDROLASE, 3 | |
| | | | | | | | | | | GLYCOPROTEIN | |
| 231 | 9wga | A | 290 | 462 | 7e−15 | 0.01 | −1202.08 | | LECTIN (AGGLUTININ) WHEAT | | |
| | | | | | | | | | GERM AGGLUTININ | | |
| | | | | | | | | | (ISOLECTIN 2) 9WGA 3 | | |
| 231 | 9wga | A | 98 | 263 | 2.8e−15 | −0.00 | −1202.08 | | LECTIN (AGGLUTININ) WHEAT | | |
| | | | | | | | | | GERM AGGLUTININ | | |
| | | | | | | | | | (ISOLECTIN 2) 9WGA 3 | | |
| 232 | 1f88 | A | 1 | 275 | 7e−82 | | | 58.80 | RHODOPSIN; CHAIN: A, B | SIGNALING PROTEIN | |
| | | | | | | | | | | PHOTORECEPTOR, G PROTEIN- | |
| | | | | | | | | | | COUPLED RECEPTOR, MEMBRANE | |
| | | | | | | | | | | PROTEIN, 2 RETINAL PROTEIN, | |
| | | | | | | | | | | VISUAL PIGMENT | |
| 232 | 1188 | A | 25 | 366 | 1.4e−90 | | | 95.22 | RHODOPSIN; CHAIN: A, B | SIGNALING PROTEIN | |
| | | | | | | | | | | PHOTORECEPTOR, G PROTEIN- | |
| | | | | | | | | | | COUPLED RECEPTOR, MEMBRANE | |
| | | | | | | | | | | PROTEIN, 2 RETINAL PROTEIN, | |
| | | | | | | | | | | VISUAL PIGMENT | |
| 232 | 1f88 | B | 23 | 352 | 2.8e−82 | | | 66.80 | RHODOPSIN; CHAIN: A, B | SIGNALING PROTEIN | |
| | | | | | | | | | | PHOTORECEPTOR, G PROTEIN- | |
| | | | | | | | | | | COUPLED RECEPTOR, MEMBRANE | |
| | | | | | | | | | | PROTEIN, 2 RETINAL PROTEIN, | |
| | | | | | | | | | | VISUAL PIGMENT | |
| 234 | 1aqc | A | 661 | 780 | 6e−23 | 0.03 | −1202.08 | | X11; CHAIN A, B; PEPTIDE; | COMPLEX (PEPTIDE BINDING | |
| | | | | | | | | | CHAIN. C, D | MODULE/PEPTIDE), PEPTIDE | |
| | | | | | | | | | | BINDING 2 MODULE, PTB DOMAIN | |
| 234 | 1ddm | A | 484 | 618 | 1.5e−13 | 0.11 | −1202.08 | | NUMB PROTEIN; CHAIN: A; | SIGNALING PROTEIN/TRANSFERASE | |
| | | | | | | | | | NUMB ASSOCIATE KINASE; | NAK; COMPLEX, SIGNAL | |
| | | | | | | | | | CHAIN: B; | TEANSDUCTION, PHOSPHOTYROSINE | |
| | | | | | | | | | | BINDING 2 DOMAIN (PTE), | |
| | | | | | | | | | | ASYMMETRIC CELL DIVISION | |
| 234 | 1ddm | A | 661 | 778 | 4.5 e−25 | 0.45 | −1202.08 | | NUMB PROTEIN; CHAIN: A; | SIGNALING PROTEINITRANSFERASE | |
| | | | | | | | | | NUMB ASSOCIATE KINASE; | NAK; COMPLEX, SIGNAL | |
| | | | | | | | | | CHAIN: B; | TRANSDUCTION, PHOSPHOTYROSINE | |
| | | | | | | | | | | BINDING 2 DOMAIN (PTB), | |
| | | | | | | | | | | ASYMMETRIC CELL DIVISION | |
| 234 | 1shc | A | 477 | 620 | 9e−21 | 0.42 | −1202.08 | | SHC; CHAIN: A; TRKA | COMPLEX (SIGNAL | |
| | | | | | | | | | RECEPTOR PHOSPHOPEPTIDE; | TRANSDUCTION/PEPTIDE) COMPLEX | |
| | | | | | | | | | CHAIN: B; | (SIGNAL TRANSDUCTIONIPEPTIDE), | |
| | | | | | | | | | | PHOSPHOTYROSINE 2 BINDING | |
| | | | | | | | | | | DOMAIN (PTB) | |
| 234 | 1x11 | A | 661 | 782 | 3e−23 | 0.20 | −1202.08 | X11; CHAIN: A, B; 13-MER | COMPLEX (PEPTIDE BINDING | | |
| | | | | | | | | | PEPTIDE; CHAIN: C, D; | MODULE/PEPTIDE), PTE DOMAIN | |
| 234 | 2nMb | A | 661 | 786 | 7.5e−26 | 0.28 | −1202.08 | | NUMB PROTEIN; CHAIN: A; | CELL CYCLE/GENE REGULATION | |
| | | | | | | | | | GPPY PEPTIDE; CHAIN: B; | COMPLEX, SIGNAL TRANSDUCTION, | |
| | | | | | | | | | | PHOSPHOTYROSINE BINDING 2 | |
| | | | | | | | | | | DOMAIN (PTB), ASYMETR IC CELL | |
| | | | | | | | | | | DIVISION | |
| 237 | 1a25 | A | 224 | 347 | 4.2e−24 | 0.06 | −1202.08 | | PROTEIN KINASE C (BETA); | CALCIUM-BINDING PROTEIN CALB; | |
| | | | | | | | | | CHAIN: A, B; | CALCIUM++/PHOSPHOLIPID BINDING | |
| | | | | | | | | | | PROTEIN, 2 CALCIUM-BINDING | |
| | | | | | | | | | | PROTEIN | |
| 237 | 1a25 | A | 72 | 191 | 4.2e−24 | 0.15 | −1202.08 | | PROTEIN KINASE C (BETA); | CALCIUM-BINDING PROTEIN CALB; | |
| | | | | | | | | | CHAIN: A, B; | CALCIUM++/PHOSPHOLIPID BINDING | |
| | | | | | | | | | | PROTEIN, 2 CALCIUM-BINDING | |
| | | | | | | | | | | PROTEIN | |
| 237 | 1byn | A | 69 | 185 | 8.4e−30 | 0.21 | −1202.08 | | SYNAPTOTAGMIN I; CHAIN: A; | ENDOCYTOSIS/EXOCYTOSIS | |
| | | | | | | | | | | SYNAPTOTAGMIN, C2-DOMAIN, | |
| | | | | | | | | | | EXOCYTOSIS, NEUROTRANSMITTER | |
| | | | | | | | | | | 2 RELEASE, | |
| | | | | | | | | | | ENDOCYTOSIS/EXOCYTOSIS | |
| 237 | 1djx | A | 255 | 356 | 2.8e−21 | 0.32 | −1202.08 | | PHOSPHOINOSITIDE-SPECIFIC | LIPID DEGRADATION PLC-D1; | |
| | | | | | | | | | PHOSPHOLIPASE C, CHAIN: A, | PHOSPHORIC DIESTER HYDROLASE, | |
| | | | | | | | | | B; | HYDROLASE, LIPID DEGRADATION, 2 | |
| | | | | | | | | | | TRANSDUCER, CALCIUM-I3INDING, | |
| | | | | | | | | | | PHOSPHOLIPASE C, 3 | |
| | | | | | | | | | | PHOSPHOINOSITIDE-SPECIFlC | |
| 237 | 1djx | B | 115 | 355 | 1e−31 | 0.00 | −1202.08 | | PHOSPHOINOSITIDE-SPECIFIC | LIPID DEGRADATION PLC-D1; | |
| | | | | | | | | | PHOSPHOLIPASE C, CHAIN: A, | PHOSPHORIC DIESTER HYDROLASE, | |
| | | | | | | | | | B; | HYDROLASE, LIPID DEGRADATION, 2 | |
| | | | | | | | | | | TRANSDUCER, CALCIUM-BINDING, | |
| | | | | | | | | | | PHOSPHOLIPASE C, 3 | |
| | | | | | | | | | | PHOSPHOlNOSITIDE-SPECIFIC | |
| 237 | 1dix | B | 255 | 356 | 2.8e−21 | 0.38 | −1202.08 | | PHOSPHOINOSITIDE-SPECIFIC | LIPID DEGRADATION PLC-D1; | |
| | | | | | | | | | PHOSPHOLIPASE C, CHAIN: A, | PHOSPHORIC DIESTER HYDROLASE, | |
| | | | | | | | | | B; | HYDROLASE, LIPID DEGRADATION, 2 | |
| | | | | | | | | | | TRANSDUCER, CALCIUM-BINDING, | |
| | | | | | | | | | | PHOSPHOLIPASE C, 3 | |
| | | | | | | | | | | PHOSPHOlNOSITIDE-SPECIFIC | |
| 237 | 1dsy | A | 70 | 194 | 4.2E−26 | 0.20 | −1202.08 | | PROTEIN KINASE C, ALPHA | TRANSFERASE CALCIUM++, | |
| | | | | | | | | | TYPE; CHAIN: A; | PHOSPHOLIPID B1NDING PROTEIN, | |
| | | | | | | | | | | CALCIUM-BINDING 2 PROTEIN, | |
| | | | | | | | | | | PHOSPHATIDYLSERINE, PROTEIN | |
| | | | | | | | | | | KINASE C | |
| 237 | 1r1w | | 240 | 331 | 1.5E−22 | 0.20 | −1202.08 | | PHOSPHOLIPASE A2; CHAIN: | HYDROLASE CALB DOMAIN; | |
| | | | | | | | | | NULL; | HYDROLASE, C2 DOMAIN, CALB | |
| | | | | | | | | | | DOMAIN | |
| 237 | 1r1w | | 90 | 181 | 8.4e−16 | 0.21 | −1202.08 | | PHOSPHOLIPASE A2; CHAIN: | HYDROLASE CALB DOMAIN; | |
| | | | | | | | | | NULL; | HYDROLASE, C2 DOMAIN, CALB | |
| | | | | | | | | | | DOMAIN | |
| 237 | 3rpb | A | 227 | 340 | 6e−24 | 0.05 | −1202.08 | | RABPHILIN 3-A; CHAIN: A; | ENDOCYTOSIS/EXOCYTOSIS C2- | |
| | | | | | | | | | | DOMAINS, C2B-DOMAIN, RABPHIL1N, | |
| | | | | | | | | | | ENDOCYTOSIS/EXOCYTOSIS | |
| 237 | 3rpb | A | 72 | 191 | 4.2e−20 | 0.10 | −1202.08 | | RABPHILIN 3-A; CHAIN: A; | ENDOCYTOSIS/EXOCYTOSIS C2- | |
| | | | | | | | | | | DOMAINS, C2B-DOMAIN, RABPHILIN, | |
| | | | | | | | | | | ENDOCYTOSIS/EXOCYTOSLS | |
| 238 | 1cex | | 8 | 53 | 0.0006 | 1.11 | −1202.08 | | CUTINASE; CHAIN: NULL; | SERINE ESTERASE HYDROLASE, | |
| | | | | | | | | | | SERINE ESTERASE, GLYCOPROTEIN | |
| 238 | 1kap | P | 8 | 53 | 0.0015 | 1.00 | −1202.08 | | ALKALINE PROTEASE; 1KAP 4 | ZINC METALLOPROTEASE P. | |
| | | | | | | | | | CHAIN: P; 1KAP 5 | AERUGINOSA ALKALINE PROTEASE; | |
| | | | | | | | | | TETRkPEPTIDE (GLY SER ASN | 1KAP 6 CALCIUM BINDING PROTEIN | |
| | | | | | | | | | SER); IKAP9CHAIN:I; 1KAP 10 | 1KAP 19 | |
| 238 | 1qq4 | A | 24 | 53 | 0.003 | 2.03 | −1202.08 | | ALPHA-LYTIC PROTEASE; | HYDROLASE DOUBLE BETA BARREL, | |
| | | | | | | | | | CHAIN: A; | BACTERIAL SER1NE PROTEASE | |
| 238 | 1tal | | 3 | 53 | 3e−05 | 1.40 | −1202.08 | | ALPHA-LYTIC PROTEASE; | SERINE PROTEASE SERINE | |
| | | | | | | | | | CHAIN: NULL; | PROTEASE, LOW TEMPERATURE, | |
| | | | | | | | | | | HYDROLASE, 2 SERINE PROTELNASE | |
| 238 | 1tal | | 3 | 70 | 0.003 | 0.91 | −1202.08 | | ALPHA-LYTIC PROTEASE; | SERINE PROTEASE SERJNE | |
| | | | | | | | | | CHAIN: NULL; | PROTEASE, LOW TEMPERATURE, | |
| | | | | | | | | | | HYDROLASE, 2 SERINE PROTEINASE | |
| 238 | 1tal | | 8 | 63 | 0.00045 | 1.19 | −1202.08 | | ALPHA-LYTIC PROTEASE; | SERINE PROTEASE SERINE | |
| | | | | | | | | | CHAIN: NULL; | PROTEASE, LOW TEMPERATURE, | |
| | | | | | | | | | | HYDROLASE, 2 SERINE PROTEINASE | |
| 239 | 1cex | | 8 | 67 | 9e−06 | 1.25 | −1202.08 | | CUTINASE; CHAiN: NULL; | SERINEESTERASE HYDROLASE, | |
| | | | | | | | | | | SERINE ESTERASE, GLYCOPROTEIN | |
| 239 | 1ga6 | A | 8 | 67 | 0.0006 | 0.92 | −1202.08 | | SERIN-CARBOXYL | HYDROLASE PSCP, | |
| | | | | | | | | | PROTEINASE; CHAIN: A; | PSEUDOMONAPEPSIN, PEPSTATIN- | |
| | | | | | | | | | FRAGMENT OF TYROSTATIN; | INSENSITIVE SERINE-CARBOXYL | |
| | | | | | | | | | CHAIN: I; | PROTEINASE | |
| 239 | 1qq4 | A | 24 | 53 | 0.003 | 2.03 | −1202.08 | | ALPHA-LYTIC PROTEASE; | HYDROLASE DOUBLE BETA BARREL, | |
| | | | | | | | | | CHAIN: A; | BACTERIAL SERINE PROTEASE | |
| 239 | 1tal | | 24 | 67 | 3e−05 | 1.57 | −1202.08 | | ALPHA-LYTIC PROTEASE; | SERINE PROTEASE SERINE | |
| | | | | | | | | | CHAIN: NULL; | PROTEASE, LOW TEMPERATURE, | |
| | | | | | | | | | | HYDROLASE, 2 SERINE PROTEINASE | |
| 239 | 1tal | | 3 | 63 | 3e−07 | 1.27 | −1202.08 | | ALEHA-LYTIC PROTEASE; | SERINE PROTEASE SERINE | |
| | | | | | | | | | CHAIN: NULL; | PROTI3ASE, LOW TEMPERATURE, | |
| | | | | | | | | | | HYDROLASE, 2 SERINE PROTEINASE | |
| 241 | 1f88 | A | 107 | 436 | 1.5e−15 | | | 61.82 | RHODOPSIN; CHAIN: A, B | SIGNALING PROTEIN | |
| | | | | | | | | | | PHOTORECEPTOR, G PROTEIN- | |
| | | | | | | | | | | COUPLED RECEPTOR, MEMBRANE | |
| | | | | | | | | | | PROTEIN, 2 RETINAL PROTEIN, | |
| | | | | | | | | | | VISUAL PIGMENT | |
| 241 | 1f88 | B | 107 | 434 | 4.5e−13 | | | 68.15 | RHODOPSIN; CHAIN: A, B | SIGNALING PROTEIN | |
| | | | | | | | | | | PHOTORECEPTOR, G PROTEIN- | |
| | | | | | | | | | | COUPLED RECEPTOR, MEMBRANE | |
| | | | | | | | | | | PROTEIN, 2 RETINAL PROTEIN, | |
| | | | | | | | | | | VISUAL PIGMENT | |
| 242 | 1erj | A | 24 | 362 | 5.6e−52 | 0.54 | −1202.08 | | TRANSCRIPTIONAL | TRANSCRIPTION INHIBITOR BETA- | |
| | | | | | | | | | REPRESSOR TUP1; CHAIN: A, B, | PROPELLER | |
| | | | | | | | | | C; | | |
| 242 | 1erj | A | 480 | 761 | 1.4e−55 | 0.10 | −1202.08 | | TRANSCRIPTIONAL | TRANSCRIPTION INHIBITOR BETA- | |
| | | | | | | | | | REPRESSOR TUPI; CHAIN: A, B, | PROPELLER | |
| | | | | | | | | | C; | | |
| 242 | 1erj | A | 725 | 931 | 2.Se−21 | 0.11 | −1202.08 | | TRANSCRIPTIONAL | TRANSCRIPTION INHIBITOR BETA- | |
| | | | | | | | | | REPRESSOR TUPI; CHAIN: A, B, | PROPELLER | |
| | | | | | | | | | C; | | |
| 242 | 1erj | A | 72 | 431 | 4.2e−50 | 0.16 | −1202.08 | | TRANSCRIPTIONAL | TRANSCRIPTION INHIBITOR BETA- | |
| | | | | | | | | | REPRESSOR TUPi; CHAIN: A, B, | PROPELLER | |
| | | | | | | | | | C; | | |
| 242 | 1got | B | 17 | 363 | 1.4e−58 | 0.36 | −1202.08 | | GT-ALPHA/GI-ALPHA | COMPLEX (GTP- | |
| | | | | | | | | | CHIMERA; CHAIN: A; GT-BETA; | BINDING/TRANSDUCER) BETA1, | |
| | | | | | | | | | CHAIN: B; GT-GAMMA; CHAIN: | TRANSDUCIN BETA SUBUNIT; | |
| | | | | | | | | | G; | GAMMAI, TRANSDUCIN GAMMA | |
| | | | | | | | | | | SUBUNIT; COMPLEX (GTP- | |
| | | | | | | | | | | BINDING/TRANSDUCER), G PROTEIN, | |
| | | | | | | | | | | HETEROTRIMER 2 SIGNAL | |
| | | | | | | | | | | TRANSDUCTION | |
| 242 | 1got | B | 513 | 802 | 1.1 e−43 | 0.10 | −1202.08 | | GT-ALPHA/GI-ALPHA | COMPLEX (GTP- | |
| | | | | | | | | | CHIMERA; CHAIN: A; GT-BETA; | BINDING/TRANSDUCER) BETA1, | |
| | | | | | | | | | CHAIN: B; GT-GAMMA; CHAIN: | TRANSDUCIN BETA SUBUNIT; | |
| | | | | | | | | | G; | GAMMAI, TRANSDUCIN GAMMA | |
| | | | | | | | | | | SUBUNIT; COMPLEX (GTP- | |
| | | | | | | | | | | BINDING/TRANSDUCER), G PROTEIN, | |
| | | | | | | | | | | HETEROTRIMER 2 SIGNAL | |
| | | | | | | | | | | TRANSDUCTION | |
| 242 | 1got | B | 552 | 887 | 4.2e−34 | 0.10 | −1202.08 | | GT-ALPHA/GI-ALPHA | COMPLEX (GTP- | |
| | | | | | | | | | CHIMERA; CHAIN: A; GT-BETA; | BINDING/TRANSDUCER) BETA1, | |
| | | | | | | | | | CHAIN: B; GT-GAMMA; CHAIN: | TRANSDUC1N BETA SUBUNIT; | |
| | | | | | | | | | G; | GAMMAl, TRANSDUCIN GAMMA | |
| | | | | | | | | | | SUBUNIT; COMPLEX (GTP- | |
| | | | | | | | | | | BINDING/TRANSDUCER), G PROTEIN, | |
| | | | | | | | | | | HETEROTRIMER 2 SIGNAL | |
| | | | | | | | | | | TRANSDUCTION | |
| 242 | 1got | B | 644 | 936 | 2.8e−28 | 0.31 | −1202.08 | | GT-ALPHA/GI-ALPHA | COMPLEX (GTP- | |
| | | | | | | | | | CHIMERA; CHAIN: A; GT-BETA; | BINDING/TRANSDUCER) BETA1, | |
| | | | | | | | | | CHAIN: B; GT-GAMMA; CHAIN: | TRANSDUCIN BETA SUBUNIT; | |
| | | | | | | | | | G; | GAMMAI, TRANSDUCIN GAMMA | |
| | | | | | | | | | | SUBUNIT; COMPLEX (GTP- | |
| | | | | | | | | | | BINDING/TRANSDUCER), G PROTEIN, | |
| | | | | | | | | | | HETEROTRIMER 2 SIGNAL | |
| | | | | | | | | | | TRANSDUCTION | |
| 247 | 1b61 | A | 176 | 280 | 4.2e−57 | 0.22 | −1202.08 | | RETROPEPSIN; CHAIN: A, B; | HYDROLASE/HYDROLASE INHIBITOR | |
| | | | | | | | | | | HIV-1 PR; COMPLEX (ACID | |
| | | | | | | | | | | PROTEINASE/PEPTIDE) | |
| 247 | 1bai | A | 162 | 279 | 2.8e−17 | | | 55.92 | ROUS SARCOMA VIRUS | COMPLEX (PROTEASE/INHIBITOR) | |
| | | | | | | | | | PROTEASE; CHAIN: A, B; | HUMAN IMMUNODEFIClENCY ViRUS | |
| | | | | | | | | | INHIBITOR; CHAIN: C; | PROTEASE, ROUS SARCOMA VIRUS 2 | |
| | | | | | | | | | | PROTEASE, CRYSTAL STRUCTURES, | |
| | | | | | | | | | | PROTEIN-MEDIATED INTERACTION, 3 | |
| | | | | | | | | | | VIRAL MATURATION, COMPLEX | |
| | | | | | | | | | | (PROTEASE/INHIBITOR) HEADER | |
| 247 | 1bai | A | 1 | 111 | 1.4e−24 | | | 52.01 | ROUS SARCOMA VIRUS | COMPLEX (PROTEASE/INHIBITOR) | |
| | | | | | | | | | PROTEASE; CHAIN: A, B; | HUMAN IMMUNODEFICIENCY VIRUS | |
| | | | | | | | | | INHIBITOR; CHAIN: C; | PROTEASE, ROUS SARCOMA VIRUS 2 | |
| | | | | | | | | | | PROTEASE, CRYSTAL STRUCTURES, | |
| | | | | | | | | | | PROTEIN-MEDIATED INTERACTION, 3 | |
| | | | | | | | | | | VIRAL MATURATION, COMPLEX | |
| | | | | | | | | | | (PROTEASE/INHIBITOR) HEADER | |
| 247 | 1bwb | A | 176 | 280 | 1.4e−60 | 0.15 | −1202.08 | | HIV-1 PROTEASE; CHAIN: A, B; | HYDROLASE HIV-1 PROTEASE, | |
| | | | | | | | | | | HYDROLASE | |
| 247 | 1c6x | A | 176 | 280 | 2.8e−60 | 0.42 | −1202.08 | | PROTEASE; CHAIN: A, B; | HYDROLASE HYDROLASE | |
| 247 | 1daz | C | 176 | 280 | 5.6e−58 | 0.29 | −1202.08 | | PEPTIDE INHIBITOR; CHAIN: A, | HYDROLASE HIV-1 PROTEASE, | |
| | | | | | | | | | B; HIV-1 PROTEASE | MUTANT, DIMER, INHIBITOR, | |
| | | | | | | | | | (RETROPEPSIN); CHAIN: C, D; | OCCUPANCY | |
| 247 | 1dun | | 44 | 161 | 7.5e−23 | | | 57.26 | DEOXYURIDINE 5′- | HYDROLASE DUTPASE, DUTP | |
| | | | | | | | | | TEIPHOSPHATE | PYROPHOSPHATASE; HYDROLASE, | |
| | | | | | | | | | NUCLEODITOHYDROLASE; | DUTPASE, EIAV, TRIMERIC ENZYME, | |
| | | | | | | | | | CHAIN: NULL; | ASPARTYL PROTEASE | |
| 247 | 1dun | | 58 | 150 | 7.5 e−23 | 0.91 | −1202.08 | | DEOXYURIDINE 5′- | HYDROLASE DUTPASE, DUTP | |
| | | | | | | | | | TRIPHOSPHATE | PYROPHOSPHATASE; HYDROLASE, | |
| | | | | | | | | | NUCLEODITOHYDROLASE; | DUTPASE, EIAV, TRIMERIC ENZYME, | |
| | | | | | | | | | CHAIN: NULL; | ASPARTYL PROTEASE | |
| 247 | 1dun | | 9 | 126 | 1.4e−18 | | | 56.78 | DEOXYURIDINE 5′- | HYDROLASE DUTPASE, DUTP | |
| | | | | | | | | | TRIPHOSPHATE | PYROPHOSPHATASE; HYDROLASE, | |
| | | | | | | | | | NUCLEODITOHYDROLASE; | DUTPASE, EIAV, TRIMERIC ENZYME, | |
| | | | | | | | | | CHAIN: NULL; | ASPARTYL PROTEASE | |
| 247 | 1euw | A | 1 | 125 | 7e−22 | | | 61.05 | DEOXYURIDINE 5′- | HYDROLASE DUTPASE; JELLY ROLL, | |
| | | | | | | | | | TRIPHOSPHATE | MERCURY DERIVATIVE | |
| | | | | | | | | | NUCLEOTIDOHYDROLASE; | | |
| | | | | | | | | | CHAIN: A; | | |
| 247 | 1euw | A | 32 | 160 | 4.Se−18 | | | 62.42 | DEOXYURIDINE 5′- | HYDROLASE DUTPASE; JELLY ROLL, | |
| | | | | | | | | | TRIPHOSPHATE | MERCURY DERIVATIVE | |
| | | | | | | | | | NUCLEOTIDOHYDROLASE; | | |
| | | | | | | | | | CHAIN: A; | | |
| 247 | 1euw | A | 58 | 150 | 4.5e−18 | 0.76 | −1202.08 | | DEOXYURIDINE 5′- | HYDROLASE DUTPASE; JELLY ROLL, | |
| | | | | | | | | | TRIPHOSPHATE | MERCURY DERIVATIVE | |
| | | | | | | | | | NUCLEOTIDOHYDROLASE; | | |
| | | | | | | | | | CHAIN: A; | | |
| 247 | 1f7d | A | 43 | 157 | 1.2e−22 | | | 62.82 | POL POLYPROTEIN; CHAIN: A, | VIRUS/VIRAL PROTEIN EIGHT | |
| | | | | | | | | | B; | STRANDED BETA-BARREL | |
| 247 | 1f7d | A | 58 | 150 | 1.2e−22 | 0.83 | −1202.08 | | POL POLYPROTEIN; CHAIN: A, | VIRUS/VIRAL PROTEIN EIGHT | |
| | | | | | | | | | B; | STRANDED BETA-BARREL | |
| 247 | 1F7d | A | 8 | 122 | 1.4e−21 | | | 62.45 | POL POLYPROTEIN; CHAIN: A, | VIRUS/VIRAL PROTEIN EIGHT | |
| | | | | | | | | | B; | STRANDED BETA-BARREL | |
| 247 | 1f7r | A | 43 | 180 | 1.5e−24 | | | 73.37 | POLPOLYPROTEIN; CHAIN: A; | VIRUS/VIRAL PROTEIN EIGHT | |
| | | | | | | | | | | STRANDED BETA BARREL PROTEIN | |
| 247 | 1f7r | A | 58 | 166 | 1.5e−24 | 0.29 | −1202.08 | | POLPOLYPROTEIN; CHAIN: A; | VIRUS/VIRAL PROTEIN EIGHT | |
| | | | | | | | | | | STRANDED BETA BARREL PROTEIN | |
| 247 | 1f7r | A | 8 | 136 | 2.8e−26 | | | 71.47 | POL POLYPROTEIN CHAIN: A; | VIRUS/VIRAL PROTEIN EIGHT | |
| | | | | | | | | | | STRANDED BETA BARREL PROTEIN | |
| 247 | 1fmb | | 176 | 280 | 2.8e−13 | | | 51.30 | EIAV PROTEASE; CHAIN: | HYDROLASE (ACID PROTEINASE) | |
| | | | | | | | | | NULL; | HYDROLASE (ACID PROTEINASE), | |
| | | | | | | | | | | RNA-DIRECTED DNA POLYMERASE,2 | |
| | | | | | | | | | | ASPARTYL PROTEASE, | |
| | | | | | | | | | | ENDONUCLEASE, POLYPROTEIN | |
| 247 | 1g61 | A | 170 | 280 | 2.8e−63 | −0.00 | −1202.08 | | HIV-1 PROTEASE; CHAIN: A; | HYDROLASE HYDROLASE | |
| 247 | 1g61 | A | 93 | 280 | 2.8e−63 | | | 53.13 | HIV-1 PROTEASE; CHAIN: A; | HYDROLASE HYDROLASE | |
| 247 | 1hvc | | 148 | 280 | 1.4e−63 | 0.13 | −1202.08 | HYDROLASE(ACID PROTEASE) | | | |
| | | | | | | | | | HIV-1 PROTEASE (TETHERED | | |
| | | | | | | | | | DIMER LINKED BY 1HVC 3 | | |
| | | | | | | | | | GLY-GLY-SER-SER-GLY) | | |
| | | | | | | | | | COMPLEXED WITH A-76928 | | |
| | | | | | | | | | 1HVC 4 | | |
| 247 | 1hvc | | 60 | 280 | 1.4e−63 | | | 54.32 | HYDROLASE(ACID PROTEASE) | | |
| | | | | | | | | | HIV-1 PROTEASE (TETHERED | | |
| | | | | | | | | | DIMER LINKED BY 1HVC 3 | | |
| | | | | | | | | | GLY-GLY-SER-SER-GLY) | | |
| | | | | | | | | | COMPLEXED WITH A-76928 | | |
| | | | | | | | | | 1HVC 4 | | |
| 247 | 1ida | A | 176 | 279 | 2.8e−37 | 0.08 | −1202.08 | | HYDROLASE(ACID | | |
| | | | | | | | | | PROTEINASE) HUMAN | | |
| | | | | | | | | | IMMUNODEFICIENCY VIRUS | | |
| | | | | | | | | | TYPE 2 (HIV-2) PROTEASE lIDA | | |
| | | | | | | | | | 3 COMPLEXED WITH THE | | |
| | | | | | | | | | INHIBITOR BILA 1906 | | |
| | | | | | | | | | CONTAINING THE 1IDA 4 | | |
| | | | | | | | | | HYDROXYETHYLAMVINE | | |
| | | | | | | | | | DIPEPTIDE ISOSTERE 1IDA 5 | | |
| 247 | 1sip | | 176 | 280 | 1.4e−39 | 0.29 | −1202.08 | | HYDROLASE(ACID | | |
| | | | | | | | | | PROTEINASE) SIMIAN | | |
| | | | | | | | | | IMMUNODEFICIENCY VIRUS | | |
| | | | | | | | | | (SIV) PROTEINASE 1SIP 3 (SIV | | |
| | | | | | | | | | MAC251-32H ISOLATE) | | |
| | | | | | | | | | (E.C.3.4.23.-) 1SIP 4 | | |

[0469] TABLE 6

| SEQ | | | |
|---|---|---|---|
| ID NO: | Position of Signal Peptide | Maximum score | Mean score |
| 125 | 1-31 | 0.921 | 0.630 |
| 126 | 1-36 | 0.972 | 0.563 |
| 127 | 1-39 | 0.976 | 0.551 |
| 128 | 1-26 | 0.937 | 0.703 |
| 129 | 1-74 | 0.991 | 0.543 |
| 130 | 1-19 | 0.983 | 0.965 |
| 131 | 1-23 | 0.945 | 0.797 |
| 132 | 1-16 | 0.977 | 0.506 |
| 133 | 1-21 | 0.967 | 0.759 |
| 134 | 1-22 | 0.861 | 0.539 |
| 135 | 1-27 | 0.934 | 0.682 |
| 136 | 1-18 | 0.983 | 0.962 |
| 137 | 1-22 | 0.827 | 0.517 |
| 138 | 1-34 | 0.980 | 0.703 |
| 139 | 1-15 | 0.987 | 0.955 |
| 140 | 1-28 | 0.995 | 0.945 |
| 141 | 1-18 | 0.995 | 0.977 |
| 142 | 1-25 | 0.935 | 0.739 |
| 143 | 1-19 | 0.976 | 0.950 |
| 144 | 1-49 | 0.933 | 0.538 |
| 145 | 1-22 | 0.918 | 0.723 |
| 146 | 1-25 | 0.972 | 0.902 |
| 147 | 1-52 | 0.981 | 0.622 |
| 148 | 1-75 | 0.969 | 0.541 |
| 149 | 1-75 | 0.979 | 0.817 |
| 150 | 1-22 | 0.957 | 0.756 |
| 151 | 1-45 | 0.978 | 0.852 |
| 152 | 1-29 | 0.984 | 0.954 |
| 153 | 1-36 | 0.994 | 0.713 |
| 154 | 1-34 | 0.914 | 0.608 |
| 155 | 1-25 | 0.986 | 0.952 |
| 156 | 1-38 | 0.990 | 0.909 |
| 157 | 1-54 | 0.908 | 0.565 |
| 158 | 1-20 | 0.870 | 0.708 |
| 159 | 1-27 | 0.985 | 0.856 |
| 160 | 1-23 | 0.966 | 0.812 |
| 161 | 1-54 | 0.967 | 0.524 |

[0470] TABLE 7

| SEQ ID NO: | Chromosomal Location |
|---|---|
| 1 | 13q12-q14 |
| 2 | 13q12-q14 |
| 3 | 20q12 |
| 4 | 4 |
| 5 | 4 |
| 6 | 9q33-q34 |
| 7 | 9q33-q34 |
| 8 | 2 |
| 9 | 2 |
| 10 | 2 |
| 11 | 13q12-q14 |
| 12 | 13q12-q14 |
| 13 | 13q12-q14 |
| 14 | 13q12-q14 |
| 15 | 13q12-q14 |
| 16 | 17 |
| 17 | 6p21.3 |
| 18 | 13q12-q14 |
| 19 | 13q12-q14 |
| 20 | 13q12-q14 |
| 21 | 13q12-q14 |
| 22 | 13q12-q14 |
| 23 | 13q12-q14 |
| 24 | 13q12-q14 |
| 25 | 13q12-q14 |
| 26 | 13q12-q14 |
| 27 | 13q12-q14 |
| 28 | 13q12-q14 |
| 29 | 13q12-q14 |
| 30 | 13q12-q14 |
| 31 | 13q12-q14 |
| 32 | 2 |
| 33 | 2 |
| 34 | 19q13.3-q13.4 |
| 35 | 19q13.3-q13.4 |
| 36 | 19q13.3-q13.4 |
| 37 | 19q13.3-q13.4 |
| 38 | 4 |
| 39 | 4 |
| 40 | 9q33-q34 |
| 41 | 13q12-q14 |
| 42 | 13q12-q14 |
| 43 | 13q12-q14 |
| 44 | 13q12-q14 |
| 45 | 22q12.1-12.3 |
| 46 | 13q12-q14 |
| 47 | 13q12-q14 |
| 48 | 13q12-q14 |
| 49 | 13q12-q14 |
| 50 | 13q12-q14 |
| 51 | 13q12-q14 |
| 52 | 8q |
| 53 | 20q12 |
| 54 | 20q12 |
| 55 | 4 |
| 56 | 4 |
| 57 | 4 |
| 58 | 9q33-q34 |
| 59 | 9q33-q34 |
| 60 | 9q33-q34 |
| 61 | 3 |
| 62 | 9q33-q34 |
| 63 | 9q33-q34 |
| 64 | 9q33-q34 |
| 65 | 9q33-q34 |
| 66 | 9q33-q34 |
| 67 | 9q33-q34 |
| 68 | 9q33-q34 |
| 69 | 2 |
| 70 | 2 |
| 71 | 13q12-q14 |
| 72 | 13q12-q14 |
| 73 | 13q12-q14 |
| 74 | 13q12-q14 |
| 75 | 13q12-q14 |
| 76 | 13q12-q14 |
| 77 | 13q12-q14 |
| 78 | 13q12-q14 |
| 79 | 13q12-q14 |
| 80 | 13q12-q14 |
| 81 | 13q12-q14 |
| 82 | 13q12-q14 |
| 83 | 13q12-q14 |
| 84 | 13q12-q14 |
| 85 | 13q12-q14 |
| 86 | 13q12-q14 |
| 87 | 13q12-q14 |
| 88 | 13q12-q14 |
| 89 | 13q12-q14 |
| 90 | 19q13 |
| 91 | 13q12-q14 |
| 92 | 13q12-q14 |
| 93 | 13q12-q14 |
| 94 | 13q12-q14 |
| 95 | 13q12-q14 |
| 96 | 13q12-q14 |
| 97 | 13q12-q14 |
| 98 | 13q12-q14 |
| 99 | 13q12-q14 |
| 100 | 13q12-q14 |
| 101 | 13q12-q14 |
| 102 | 13q12-q14 |
| 103 | 13q12-q14 |
| 104 | 13q12-q14 |
| 105 | 13q12-q14 |
| 106 | 13q12-q14 |
| 107 | 13q12-q14 |
| 108 | 13q12-q14 |
| 109 | 13q12-q14 |
| 110 | 13q12-q14 |
| 111 | 13q12-q14 |
| 112 | 13q12-q14 |
| 113 | 13q12-q14 |
| 114 | 5 |
| 115 | 5 |
| 116 | 19q13.3-q13.4 |
| 117 | 19q13.3-q13.4 |
| 118 | 19q13.3-q13.4 |
| 119 | 19q13.3-q13.4 |
| 120 | 19q13.3-q13.4 |
| 121 | 19q13.3-q13.4 |
| 122 | 19q13.3-q13.4 |
| 123 | 19q13.3-q13.4 |
| 124 | 19q13.3-q13.4 |

[0471] TABLE 8

| | | | | Amino acid sequence (A = Alanine, C = Cysteine, |
|---|---|---|---|---|
| | | | | D = Aspartic Acid, E = Glutamic Acid, |
| | | | | F = Phenylalaaine, G = Glycine, H = Histidine, |
| | | | Predicted | I = Isoleucine, K = Lysine, L = Leucine, |
| | | | location of first | M = Methionine, N = Asparagine, P = Proline, |
| | | | nucleotide of | Q = Glutamine, R = Arginine, S = Serine, |
| SEQ ID | | Predicted nucleotide | codon corresp. | T = Threonine, V = Valine, W = Tryptophan, |
| NO: of | | location corresp. to | to last residue | Y = Tyrosine, X = Unknown, * = Stop codon, / = possible |
| peptide | | first residue of | of peptide | nucleotide deletion, = possible nucleotide |
| sequence | Method | peptide sequence | sequence | insertion) |
| 331 | A | 3 | 438 | VSFLSSFFLSLPYGVAVGVAFSVLVVVFQ |
| | | | | TQFRNGYALAQVMDTDIYVNPKTYNRAQ |
| | | | | DIQGIKIITYCSPLYFANSEIFRQKVIAKTG |
| | | | | MDPQKVLLAKQKYLKKQEKRRMRPTQQ |
| | | | | RRSLFMKTKTVSLQELQQDFENAPPTDPMY |
| 332 | A | 1608 | 663 | SGLFSVDPASSQAMELSDVTLIEGVGNEV |
| | | | | MVVAGVVVLILALVLAWLSTYVADSGSN |
| | | | | QLLGAIVSAGDTSVLHLGHVDHLVAGQG |
| | | | | NPEPTELPHPSEGNDEKAEEAGEGRGDST |
| | | | | GEAGAGGGVEPSLEHLLDIQGLPKRQAG |
| | | | | AGSSSPEAPLRSEDSTCLPPSPGLITVRLKF |
| | | | | LNDTEELAVARPEDTVGALKSKYFPGQES |
| | | | | QMKLIYQGRLLQDPARTLRSLNITDNCVI |
| | | | | HCHRSPPGSAVPGPSASLAPSATEPPSLGV |
| | | | | NVGSLMVPVFVVLLGVVWYFRINYRQFF |
| | | | | TAPATVSLVGVTVFFSFLVFGMYGR |
| 333 | C | 163 | 245 | MLAQYYGIQGLSHMNQPGKPIPIAQEG |
| 334 | A | 841 | 1209 | SPARGKSNRTDVMITAPKNKKMTENLAA |
| | | | | PEALDSSTHSSSTATQSRAKMNTPAPTPST |
| | | | | VPAIPRGGSGGPPPCAPHDRVSSVLQCDT |
| | | | | QAMDHKTESSHSVVEFLFKRTKTPSPFHP |
| | | | | AVRENRN |
| 335 | A | 3 | 522 | FPRLFNLRSIYLQWNRISISQGLTWTWSS |
| | | | | LHNLDLSGNDIQGIEPGTFKCLPNLQKLNL |
| | | | | DSNKLTNISQETVNAWISLISITLSGNMWE |
| | | | | CSRSICPLFYWLKNFKGNKESTMICAGPK |
| | | | | HIQGEKVSDAVETYNICSEVQVVNTERSH |
| | | | | LVPQTPQKPLIIPRPTIFKPITPHP |
| 336 | A | 245 | 574 | EQAVCVGWLQIPRGTKRPKPPGGTHGRT |
| | | | | DGRREPERTGGG*APRAAKEEKLTTAKLP |
| | | | | RRLSFAALRNETLPARSALRLLLPLQSRA |
| | | | | GPPEERMLSGAGLHGQGQVSENE |
| 337 | A | 3 | 420 | KNERQTTDISVHVCCQILKRGSHYSNTQS |
| | | | | QPQEGGTQHQGGEPPQLAPGPTALPG/EPP |
| | | | | PPPAPAHSPPGPPPAGAAAPQPGARPHGA |
| | | | | PPLTPARRLRRSRLAAAALLSRTSGAPRR |
| | | | | ALAPTPGTGVPPG\PPPSGPPGNE |
| 338 | A | 2411 | 325 | NSSWPAEPAASPWRPLWRALGATFPSGS |
| | | | | QPAARTPAGPCIGGMAPPGFKHVSSMLA\ |
| | | | | LTIIAST\WALTPTHYLTKHDVERLKASLD |
| | | | | RPFTNLESAFYS\IVGLSSLG\AQVP\DAKK |
| | | | | ACTYI\RSNLDP\SNV\DSLFYGWPRASQ\A |
| | | | | LSGM*RSLFSNE\TKDLAFGQLFS*GTSSV |
| | | | | YPRSYHAS/VAALKWALGLPLASQEALSA |
| | | | | LTARLSKEETVLATVQALQTASHLSQQAD |
| | | | | LRSIVEEIEDLVARLDELGGVYLQ\FEEGL |
| | | | | ETTAL\FVAATYKA/LMDH\VGTE\PSIKE\D |
| | | | | QVIQLMN\AIF\SKKNFE\SLSEAFSV\ASAA |
| | | | | AVLSHNRYHVPVVVVPEGSASDTHEQAIL |
| | | | | RLQVTNVLSQPLTQATVKLEHAKSVAS\R |
| | | | | ATVLQKTSFTP\VGIVFELNFMN\VKFS\SG |
| | | | | Y\YDFLGRKLKGDNRYIS\NTVELRVQDPP |
| | | | | TEVGITNVDLSTV\DKDQSIAP\QTTRVTYP |
| | | | | \AKAKGTFIADSHQNFALFFQL\VGVNTGA |
| | | | | ELTPHQTFVRLHNQKTGQ\EVVFVAEPDN |
| | | | | KNVYKFELDTSERKGLNLTSRSGTYTFY\L |
| | | | | IIGDATLKNPILWNVADVVIKFPEEEAPST |
| | | | | VLSQNLFTPKQEIQHLFREPEKRPPTVVSN |
| | | | | TFTALILSPLLLLFALWIRIGANVSNFTFAP |
| | | | | STIIFHLGHAAMLGLMYVYWTQLNMFQT |
| | | | | LKYLAILGSVTFLAGNRMLAQQAVKRTAH |
| 339 | A | 2083 | 1152 | SLIIGQYCIAREGKGFTHPVGQLSCLGQKL |
| | | | | YNGTTKTVTWWSSNYTEKNPFSKFPKLQ |
| | | | | TVWAHPELHWDWTAPTGLYWVCGHRA |
| | | | | YAKLPDQWTGSCVIGTIKPSFFLVPIKTGK |
| | | | | LLGFPVCASCEK*SIAIGDWKDDEWPPEKI |
| | | | | LQYYGPATWSQDVSWGYGTPIYMLNRII |
| | | | | WLQAVLEIITNKTTQALTVLAWQETLMR |
| | | | | NAIYQNRLALDYLLAAEGGVCEKFDLTN |
| | | | | YCLHIDDQGQVVEDIVKDITKLAHAPVQV |
| | | | | WHGLNLGAMFGNWFPAIGGFKTLIIRVIIV |
| | | | | IGTCLLLPCLIPVFLQMIKNFVA |
| 340 | A | 2 | 885 | EHGAGAGGGGRTGGRGPYPGTAGLPAQG |
| | | | | AALGGLCLAVLWKRTGRPPSGQPLLTAPL |
| | | | | PCLAGSSGHLWAASAVPCQPSDYLRQPR |
| | | | | QLLQ\QKFVNSAWGWTCTFLGGFVLLVV |
| | | | | FLATRRVAVTARHLSRLVVGAAVWRGA |
| | | | | GRAFLLIEDLTGSCFEPLPQGLLLHELPDR |
| | | | | RSCLAAGHQWRGYTVSSHTFLLTFCCLL |
| | | | | MAEEAAVFAKYLAHGLPAGAPLRLVFLL |
| | | | | NVLLLGLWNFLLLCTVIYFHQYTHKVVG |
| | | | | AAVGTFAWYLTYGSWYHQPWSPGSPGH |
| | | | | GLFPRPHSSRKHN |
| 341 | A | 319 | 492 | MQGVRVSFGWAMGLAWGSCALEAFSGT |
| | | | | LLLSAAWTLSLSPPICGHLSPQQVGGRGG |
| | | | | D* |
| 342 | A | 2 | 440 | PYRPEFPGSAAGVATILRTLAMKALMLLT |
| | | | | LSVLLCWVSADIRCHSCYKVPVLGCVDR |
| | | | | QSCRLEPGQQCLTTHAYLGKMWVFSNLR |
| | | | | CGTPEEPCQEAFNQTNRKLGLTYNTTCCN |
| | | | | KDNCNSAGPRPTPALGLVFLTSLAGLGLW |
| | | | | LLH |
| 343 | A | 3 | 1234 | EFGNRFDVNNCSICYHWVTSRPQEPAVFS |
| | | | | ADYRGCHVLEKDGRFHLRVFMEAVLPNG |
| | | | | RVDVAQDATLICPKPDPSRTLDSQLAPPA |
| | | | | MFSVSIPQTLSFLPTSGHTSQGSGHAFPSPL |
| | | | | DPGHSSVHPTPALPSPGPGPTLATLAQPH |
| | | | | WGTLEHWDVNKRDYIGTHLSQEQCQVAS |
| | | | | GHLPCIVRRTSKEACQQAGCCYDNTREVP |
| | | | | CYYGNTATVQCFRDGYFVLVVSQEMALT |
| | | | | HRITLANIHLAYAPTSCSPTQHTEAFVVFY |
| | | | | FPLTHCGTTMQVAGDQLIYENWLVSGIHI |
| | | | | QKGPQGSITRDSTFQLHVRCVFNASGFLPI |
| | | | | QASIFPPPSPAPMTQPGPLRLELRIAKDETF |
| | | | | SSYYGEDDYPIVRLLREPVHVEVRLLQRT |
| | | | | DPNLVLLLHQCWGAPSANPFQQPQWPILSD |
| 344 | A | 1 | 665 | AAAASNWGLITNIVNSIVGVSVLTMPFCF |
| | | | | KQCGIVLGALLLVFCSWMTHQSCMFLVK |
| | | | | SASLSKRRTYAGLAFHAYGKAGKMLVET |
| | | | | SMIGLMLGTCIAFYVVIGDLGSNFFARLFG |
| | | | | FQVGGTFRMFLLFAVSLCIVLPLSLQRNM |
| | | | | MASIQSFSAMALLFYTVFMFVIVLSSLKH |
| | | | | GLFSGQWLRRVSYVRWEGVFRCIPIFGMS |
| | | | | FACQSQVLPTYDSLDEPSV |
| 345 | A | 2 | 1200 | PRVRLLRPSRSRSCRGLLSTRAPGPSPFRS |
| | | | | LHSSPLLPHAMKSPFYRCQNTTSVEKGNS |
| | | | | AVMGGVLFSTGLLGNLLALGLLARSGLG |
| | | | | WCSRRPLRPLPSVFYMLVCGLTVTDLLGK |
| | | | | CLLSPVVLAAYAQNRSLRVLAPALDNSLC |
| | | | | QAFAFFMSFFGLSSTLQLLAMALECWLSL |
| | | | | GHPFFYRRHITLRLGALVAPVVSAFSLAFC |
| | | | | ALPFMGFGKFVQYCPGTWCFIQMVHEEG |
| | | | | SLSVLGYSVLYSSLMALLVLATVLCNLGA |
| | | | | MRNLYAMHRRLQRHPRSCTRDCAEPRAD |
| | | | | GREASPQPLEELDHLLLLALMTVLFTMCS |
| | | | | LPVIYRAYYGAFKDVKEKNRTSEEAEDLR |
| | | | | ALRFLSVISIVDPWIFIIFRSPVFRIFFHKIFI |
| | | | | RPLRYRSRCSNSTNMESSL |
| 346 | A | 2 | 1149 | CSEAEYTSAATEAGLELVDKGKAKELPGS |
| | | | | QVIFEGPTLGQQEDQERKRLCKAMTLCIC |
| | | | | YAASIGGTATLTGTGPNVVLLGQMNELFP |
| | | | | DSKDLVNFASWFAFAFPNMLVMLLFAWL |
| | | | | WLQFVYMRFNFKKSWGCGL*SKKNEKA |
| | | | | ALKVLQEEYRKLGPLSFAEINVLICFFLLVI |
| | | | | LWFSRDPGFMPGWLTVAWVEGETKYVS |
| | | | | DATVAIFVATLLFIVPSQKPKFNFRSQTEE |
| | | | | ERKTPFYPPPLLDWKVTQEKVPWGIVLLL |
| | | | | GGGFALAKGSEASGLSVWMGKQMEPLH |
| | | | | AVPPAAITLILSLLVAVFTECTSNVATTTL |
| | | | | FLPIFASMSRSIGLNPLYIMLPCTLSASFAF |
| | | | | MLPVATPPNAIVFTYGHLKVADMVTQLF |
| | | | | LFTPVGL |
| 347 | A | 292 | 1442 | ELARRPKQQSSEKSRNMIRNWLTIFILFPL |
| | | | | KLVEKCESSVSLTVPPVVKLENGSSTNVS |
| | | | | LTLRPPLNATLVITFEITFRSKNITILELPDE |
| | | | | VVVPPGVTNSSFQVTSQNVGQLTVYLHG |
| | | | | NHSNQTGPRIRFLVIRSSAISIINQVIGWIYF |
| | | | | VAWSISFYPQVIMNWRRKSVIGLSFDFVA |
| | | | | LNLTGFVAYSVFNIGLLWVPYIKEQFLLK |
| | | | | YPNGVNPVNSNDVFFSLHAVVLTLIIIVQC |
| | | | | CLYERGGQRVSWPAIGFLVLAWLFAFVT |
| | | | | MIVAAVGVITWLQFLFCFSYIKLAVTLVK |
| | | | | YFPQAYMNFYYKSTEGWSIGNVLLDFTG |
| | | | | GSFSLLQMFLQSYNNDQWTLIFGDPTKFG |
| | | | | LGVFSIVFDVVFFIQHFCLYRKRPGYDQLN |
| 348 | A | 3 | 816 | IRNLNSPALLEDSVIRQAKAAGKRIVFYG |
| | | | | DETWVKLFPKHFVEYDGTTSFFVSDYTEV |
| | | | | DNNVTRHLDKVLKRGDWDILILHYLGLD |
| | | | | HIGHISGPNSPLIGQKLSEMDSVLMKIHTS |
| | | | | LQSKERETPLPNLLVLCGDHGMSETGSHG |
| | | | | ASSTEEGNTPLILISSAFERKPGDIRHPKHV |
| | | | | QQTDVAATLAIALGLPIPKDSVGSLLFPVV |
| | | | | EGRPMREQLRFLHLNTVQLIKLLQENVPS |
| | | | | YEKDPGFEQFKMSKRLHGNWIKLYLEEK |
| | | | | HSEVLFNL |
| 349 | A | 424 | 1 | EVRVQAPVSRPVLTLHHGPADPAVGDMV |
| | | | | QLLCEAQRGSPPILYSFYLDEKIVGNHSAP |
| | | | | CGGTTSLLFPVKSEQDAGNYSCEAENSVS |
| | | | | RERSEPKKLSLKGSQVLFTPASNWLVPWH |
| | | | | IVGTALHLELWVVSGMEGAQLFSRI |
| 350 | A | 315 | 679 | SPVWTEKRKMQDTGSVVPLHWFGFGYA |
| | | | | ALVASGGIIGYVKAGSVPSLAAGLLFGSL |
| | | | | AGLGAYQLSQDPRNVWVFLATSGTLAGI |
| | | | | MGMRFYHSGKFMPAGLIAGASLLMVAK |
| | | | | VGVSMFNRPH |
| 351 | A | 1 | 1017 | MGLGPVFLLLAGIFPFAPPGAAAEPHSLR |
| | | | | YNLTVLSWDGSVQSGFLAEVHLDGQPFL |
| | | | | RYDRQKCRAKPQGQWAEDVLGNKTWDR |
| | | | | ETRDLTGNGKDLRMTLAHIKDQKEGLHS |
| | | | | LQEIRVCEIHEDNSTRSSQHFYYDGELFLS |
| | | | | QNLETEEWTVPQSSRAQTLAMNVRNFLK |
| | | | | EDAMKTKTHYHAMHADCLQELRRYLES |
| | | | | GVVLRRTVPPMVNVTRSEASEGNITVTCR |
| | | | | ASSFYPRNIILTWRQDGVSLSHDTQQWGD |
| | | | | VLPDGNGTYQTWVATRICRGEEQRFTCY |
| | | | | MEHSGNHSTHPVPSELVSLQVLDQHPVGT |
| | | | | SDHRDATQLGFQPLMSALGSTGSTEGT |
| 352 | A | 2 | 462 | EFQEAAKLYHTNYVRNSRAIGVLWAIFTI |
| | | | | CFAIVNVVCFIQPYWIGDGVDTPQAGYFG |
| | | | | LFHYCIGNGFSRELTCRGSFTDFSTLPSGA |
| | | | | FKAASFFIGLSMMLIIACIICFTLFFFCNTAT |
| | | | | VYKICAWMQLTSAACLVLGCMIFPDGWD |
| | | | | SDEVN |
| 353 | A | 170 | 619 | AWSRRRSWRRRRRRSPRRE/LMPEKRAG |
| | | | | AQAAGSTWLQGFGPPSVYHAAIVIFLEFF |
| | | | | AWGLLTTPMLTVLHETFSQHTFLMNGLIQ |
| | | | | GVKGLLSFLSAPLIGALSDVWGRKPFLLG |
| | | | | TVFFTCFPIPLMRISPCLCKYRIRDKRPYN |
| | | | | MIFGMN |
| 354 | A | 170 | 619 | AWSRRRSWRRRRRRSPRRE/LMPEKRAG |
| | | | | AQAAGSTWLQGFGPPSVYHAAIVIFLEFF |
| | | | | AWGLLTTPMLTVLHETFSQHTFLMNGLIQ |
| | | | | GVKGLLSFLSAPLIGALSDVWGRKPFLLG |
| | | | | TVFFTCFPIPLMRISPCLCKYRIRDKRPYN |
| | | | | MIFGMN |
| 355 | A | 337 | 642 | FAFPHYYIKPYHLKRIHRAVLRGNLEKLK |
| | | | | YLLLTYYDANKRDRKERTALHLACATGQ |
| | | | | PEMVHLLVSRRCELNLCDREDRTPLIKAV |
| | | | | QLRQEACATLLLQNGA |
| 356 | A | 609 | 6 | PLGVNGLAFLIMVFLIGVCCVPFKEPALQP |
| | | | | TEVRNCFGREVAVANRFFFIVFSDAICWIP |
| | | | | VFVVKILSLFRVEIPGQSLLSFPSIIHRAFLR |
| | | | | PSFDKARVFQRNISLNYHPCMKIPSQELRN |
| | | | | PGERLWHLSSRTPSTYGGSRTAPEPGPCL |
| | | | | MDQGIRHKSPLISHQGSLPKDSSSKPAHRP |
| | | | | RQLFQPESLNRQIVTGFPC |
| 357 | A | 164 | 517 | PGPGMQGPPPITPTSWSLPPWRAYVAAAV |
| | | | | LCYINLLNYMNWFIIAGVLLDIQEVFQISD |
| | | | | NHAGLLQTVFVSCLLLSAPVFGYLGDRHS |
| | | | | RKATMSFGILLWSGAGLSSSFISPRYSWLF |
| 358 | A | 113 | 1089 | KMTSLAQQLQRLALPQSDASLLSRDEVAS |
| | | | | LLFDPKEAATIDRDTAFAIGCTGLEELLGI |
| | | | | DPSFEQFEAPLFSQLAKTLERSVQTKAVN |
| | | | | KQLDENISLFLIHLSPYFLLKPAQKCLEWL |
| | | | | IHRFHIHLYNQDSLIACVLPYHETRIFVRVI |
| | | | | QLLKINNSKHRWFWLLPVKQSGVPLAKG |
| | | | | TLITHCYKDLGFMDFICSLVTKSVKVFAE |
| | | | | YPGSSAQLRVLLAFYASTIVSALVAAEDV |
| | | | | SDNIIAKLFSYIQKGLKSSLPDYRAATYMII |
| | | | | CQISVKVTMENTFVNSLASQIIKTLTKIPSL |
| | | | | IKDGLSCLIVLLQRQKPESLGKKYVQLN |
| 359 | A | 1 | 724 | VEVPSAVPRPTLDTSRAATCAPGHAVHHP |
| | | | | QSLSWPRTAGTVGGSPALRGAHP*PLPTV |
| | | | | PADCCEP*EQCPGRRGQQRLCAPSHLLAQ |
| | | | | LLLWLCTPVPKHWGSAQQPGGQVYH*CL |
| | | | | GLPPHPPWQPG*HRG*CVGACGFRDP*CG |
| | | | | QGHDSHPTQASGSKAPYPGPAPASGSART |
| | | | | NRASQHLWPRDPAPGGSPHRARPCLQCPP |
| | | | | CLLPLPGVLTGWGWVWQKAELFEAWGQ |
| | | | | EQSRHSSNGVCT |
| 360 | A | 3 | 4047 | SSNSQLYRASALFETIRHEAQLSTDYKLSL |
| | | | | FDLQTSSYQALQRVLVSLGHHDEALAVA |
| | | | | ERGRTRAFADLLVERQTGQQDSDPYSPVT |
| | | | | IDQILEMVNGQRGLVLYYSLAAGYLYSW |
| | | | | LLAPGAGIVKLFHEHYLGENTVENSSDFQA |
| | | | | SSSVTLPTATGSALEQHIASVREALGVESH |
| | | | | YSRACASSETESEAGDIMDQQFEEMNNKL |
| | | | | NSVTDPTGFLRMVRRNNLFNRSCQSMTSL |
| | | | | FSNTVSPTQDGTSSLPRRQSSFAKPPLRAL |
| | | | | YDLLIAPMEGGLMHSSGPVGRHRQLILVL |
| | | | | EGELYLIPFALLKGSSSNEYLYERFGLLAV |
| | | | | PSIRSLSVQSKSHLRKNPPTYSSSTSMAAV |
| | | | | IGNPKLPSAVMDRWLWGPMPSAEEEAYM |
| | | | | VSELLGCQPLVGSVATKERVMSALTQAE |
| | | | | CVHFATHISWKLSALVLTPSMDGNPASSK |
| | | | | SSFGHPYTIPESLRVQDDASDGESISDCPPL |
| | | | | QELLLTAADVLDLQLPVKLVVLGSSQESN |
| | | | | SKVAADGVIALTRAFLAAGAQCVLVSLW |
| | | | | PVPVAAFKMFIHAFYSSLLNGLKASAALG |
| | | | | EAMKVVQSSKAFSHPSNWAGFMLIGSDV |
| | | | | KLNSPSSLIGQALTEILQHPERARDALRVL |
| | | | | LHLVEKSLQRIQNGQRNAMYTSQQSVEN |
| | | | | KVGGIPGWQALLTAVGFRLDPPTSGLPAA |
| | | | | VFFPTSDPGDRLQQCSSTLQSLLGLPNPAL |
| | | | | QALCKLITASETGEQLISRAVKNMVGMLH |
| | | | | QVLVQLQAGEKEQDLASAPIQVSISVQLW |
| | | | | RLPGCHEFLAALGFDLCEVGQEEVILKTG |
| | | | | KQANRRTVHFALQSLLSLFDSTELPKRLS |
| | | | | LDSSSSLESLASAQSVSNALPLGYQQPPFS |
| | | | | PTGADSIASDAISVYSLSSIASSMSFVSKPE |
| | | | | GGSEGGGPGGRQDHDRSKNAYLQRSTLP |
| | | | | RSQLPPQTRPAGNKDEEEYEGFSIISNEPL |
| | | | | ATYQENRNTCFSPDHKQPQPGTAGGMRV |
| | | | | SVSSKGSISTPNSPVKMTLIPSPNSPFQKVG |
| | | | | KLASSDTGESDQSSTETDSTVKSQEESNPK |
| | | | | LDPQELAQKILEETQSHLIAVERLQRSGGQ |
| | | | | VSKSNNPEDGVQAPSSTAVFRASETSAFS |
| | | | | RPVLSHQKSQPSPVTVKPKPPARSSSLPKV |
| | | | | SSGYSSPTTSEMSIKDSPSQHSGRPSPGCD |
| | | | | SQTSQLDQPLFKLKYPSSPYSAHISKSPRN |
| | | | | MSPSSGHQSPAGSAPSPALSYSSAGSARSS |
| | | | | PADAPDIDKLKMAAIDEKVQAVHNLKMF |
| | | | | WQSTPQHSTGPMKIFRGAPGTMTSKRDV |
| | | | | LSLLNLSPRPNKKEEGVDKLELKELSLQQ |
| | | | | HDGAPPKAPPNGHWRTETTSLGSLPLPAG |
| | | | | PPATAPARPLRLPSGNGYKFLSPGRFFPSS |
| | | | | KC |
| 361 | A | 36 | 835 | KRGSVRKLKAPNP*LR/DWRMKDRMNTV |
| | | | | SVALVLCLNVGVDPPDVVKTTPCARLEC |
| | | | | WIDPLSMGPQKALGTIGANLQKQYENWQ |
| | | | | PRARYKQSLDPTVDEVKKLCTSLRRNAK |
| | | | | EERVLFHYNGHGVPRPTVNGEVWVFNKN |
| | | | | YTQYIPLSIYDLQTWMGSPSIFVYDCSNA |
| | | | | GLIVKSFKQFALQREQELEVAAINPNHPL |
| | | | | AQMPLPPSMKNCIQLAACEATELLPMIPD |
| | | | | LPADLFTSCLTTPIKIALRWFCMQKCVSLV |
| | | | | PGVTLDLIEK |
| 362 | A | 1797 | 1484 | IGISCPATIFVPMFSHSLIGIGEEYQLPYYN |
| | | | | MVPSDPSYEDMREVVCVKRLRPIVSNRW |
| | | | | NSDECLRAVLKLMSECWAHNPASRLTAL |
| | | | | RIKKTLAKMVESQDVKI |
| 363 | A | 1797 | 1484 | IGISCPATIFVPMFSHSLIGIGEEYQLPYYN |
| | | | | MVPSDPSYEDMREVVCVKRLRPIVSNRW |
| | | | | NSDECLRAVLKLMSECWAHNPASRLTAL |
| | | | | RIKKTLAKMVESQDVKI |
| 364 | A | 47 | 520 | AAGVQMKLEFLQRKFWAATRQCSTVDG |
| | | | | PCTQSCEDSDLDCFVIDNNGFILISKRSRET |
| | | | | GRFLGEVDGAVLTQLLSMGVFSQVTMYD |
| | | | | YQAMCKPSSHHHSAAQPLVSPISAFLTAT |
| | | | | RWLLQELVLFLLEWSVWGSWYDRGAEA |
| | | | | KSCLPSLPQTQEAGPA |
| 365 | A | 3 | 631 | EYGTSQVGAYQPFFRGHATMNTKRRVPW |
| | | | | LFGEEHTRLIREAIRERYGLLPYWYSLFYH |
| | | | | AHVASQPVMRPLWVEFPDELKTFDMEDE |
| | | | | YMLGSALLVHPVTEPKATTVDVFLPGSNE |
| | | | | VWYDYKTFAHWEGGCTVKIPVALDTIPV |
| | | | | FQRGGSVIPIKTTVGKSTGWMTESSYGLR |
| | | | | VALSTKGSSVGELYLDDGHSFQYLHQKQ |
| | | | | FLHRKFSFC |
| 366 | A | 1773 | 3913 | FEQNTKLDQAQQAPEDHYPISLLLPSHMA |
| | | | | IGLLMAQEGHCKDSSAMGEEAHHPLTPA |
| | | | | TPPFPPLSPDWGHMQPDFFVPVAVPAVFR |
| | | | | GPPQLQCHGRRLFLNSPCAQKSSSGLVVE |
| | | | | PGLSRTLLEMVKLTSMRGQFLEAQIPTGIS |
| | | | | LTLQYQLYQKQTNKNMSYSFVLFLKWVA |
| | | | | LGQGRRAGYPSLEDADSRRFNGSRSFLIT |
| | | | | VIGITLTVEIVTSGMMKGTRVRWSGAGNE |
| | | | | GMMGLEEGRNERSVKEAPPRRAVEAQPK |
| | | | | DRTWDVGKGQGTEGEGRGLEVEGQQHQ |
| | | | | GSEPGTIPFSVSWGVLLLAGLCCLVPSSLV |
| | | | | EDPQEDAAQKTDTSHHDQGDWEDLACQ |
| | | | | KISYNVTDLAFDLYK\SWLIYH\NQ\HVLV |
| | | | | TPTSVAMAFAMLSLGTKADTRTEILEGLN |
| | | | | VNLTETPEAKIHECFQQVLQALSRPDTRL |
| | | | | QLTTGSSLFVNKSMKLVDTFLEDTKKLYH |
| | | | | SEASSINFRDTEEAKEQINNYVEKRTGRK |
| | | | | VVDLVKHLKKDTSLALVDYISFHGKWKD |
| | | | | KFKAERIMVEGFHVDDKTIIRVPMINHLG |
| | | | | RFDIHRDRELSSWVLAQHYVGNATAFFIL |
| | | | | PDPKKMWQLEEKLTYSHLENIQRAFDIRSI |
| | | | | NLHFPKLSISGTYKLKRVPRNLGITKIFSNE |
| | | | | ADLSGVSQEAPLKLSKAVHVAVLTIDEKG |
| | | | | TEATGAPHLEEKAWSKYQTVMFNRPFLVI |
| | | | | IKEYITNFPLFIGKVVNPTQK |
| 367 | A | 47 | 888 | TLRARALQARPRTGSSCTAATWTS/SGAS |
| | | | | QHSLRALSWRRLYLSRAKLKASSRTSALL |
| | | | | SGFAMVAMVEVQLESDHEYPPGLLVAFS |
| | | | | ACTTVLVAVHLFALMVSTCLLPHIEAVSN |
| | | | | IHNLNSVHQSPHQRLHRYVELAWGFSTAL |
| | | | | GTFLFLAEVVLVGWVKFVPIGAPLDTPTP |
| | | | | MVPTSRVPGTLAPVATSLSPASNLPRSSAS |
| | | | | AAPSQAEPACPPRQACGGGGAHGPGWQA |
| | | | | AMASTAIMVPVGLVFVAFALHFYRSLVA |
| | | | | HKTDRYKQELEELNRLQGELQAV |
| 368 | A | 46 | 501 | MIVYWVLMSNFLFNTGKFIFNFIHHINDT |
| | | | | DTILSTNNSNPVICPSAGSGGHPDNSSMIF |
| | | | | YANDTGAQQFEKWWDKSRTVPFYLVGL |
| | | | | LLPLLNFKSPSFFSKFNILGINNQVILPGVT |
| | | | | EMPGYCPFLLPVSTECCAVATSYTCFEEK |
| | | | | NIGQCC |
| 369 | A | 385 | 1605 | TTTLDIQRATCCVLLICLFLGANAVWYGA |
| | | | | VGDSAYSTGHVSRLSPLSVDTVAVGLVSS |
| | | | | VVVYPVYLAILFLFRMSRSKVINTLADHR |
| | | | | HRGTDFGGSPWLLIITVFLRSYKFAISLCTS |
| | | | | YLCVSFLKTIFPSQNGHDGSTDVQQRARR |
| | | | | SNRRRQEGIKIVLEDIFTLWRQVETKVRA |
| | | | | KIRKMKVTTKVNRHDKINGKRKTAKEHL |
| | | | | RKLSMKEREHGEKERQVSEAEENGKLDM |
| | | | | KEIHTYMEMFQRAQALRRRAEDYYRCKI |
| | | | | TPSARKPLCNRVRMAAVEHRHSSGLPYW |
| | | | | PYLTAETLKNRMGHQPPPPTQQHSIIDNSL |
| | | | | SLKTPSECLLTPLPPSALPSADDNLKTPAE |
| | | | | CLLYPLPPSADDNLKTPPECLLTPLPPSAPP |
| | | | | SADDNLKTPPECVCSLPFHPQRMIISRN |
| 370 | A | 328 | 1146 | NPNPSIGDIKDIKKAAKSMLDPAHKSHFH |
| | | | | PVTPSLVFLCFIFDGLHQALLSVGVSKRSN |
| | | | | TVVGNENEERGTPYASRFKDMPNFIALEK |
| | | | | SSVLRHCCDLLIGVAAGSSDKICTSSLQVQ |
| | | | | RRFKAMMASIGRLSHGESADLLISCNAES |
| | | | | AIGWISSRPWVGELMFTFLFGDFESPLHKL |
| | | | | RKSS*LPRKHR*QPINAVRMFLDQCMDGS |
| | | | | IALRAIVSEIPVFEEKKNNG*KGIGEIF*VW |
| | | | | GCTLPPHYWGAVTTNVPKLSNSGKLLGQ |
| | | | | DEQPHIFG |
| 371 | B | 139 | 13320 | MMMVMMVVMVVVVVVVELRAIKMQM |
| | | | | EDRWSNRPDTATALAGGAVMPELILYVAI |
| | | | | TLSVAERLVGPAPHPLKMFACSKFVSTPS |
| | | | | LVKSTSQLLSRPLSAVVLKRPEILTDESLS |
| | | | | KLGSLMSPLTSTCLLNRKLPKPAPISKGTS |
| | | | | NNSSPKFNWKLGLATSWGGWFLGLGLET |
| | | | | VFGEPSSLGYARNPSLKQQLFSYAILGFAL |
| | | | | SEAMGLFCLMVAFLILFAM |
| 372 | A | 1 | 3044 | FRAALAIFARACFLLSSLASLPVFLPVFPA |
| | | | | RPPPSSPAGPLPGGIIWSPAMDAPKAGYAF |
| | | | | EYLIETLNDSSHKKFFDVSKLGTKYDVLP |
| | | | | YSIRVLLEAAVRNCDGFLMKKEDVMNIL |
| | | | | DWKTKQSNVEVPFFPARVLLQDFTGIPAM |
| | | | | VDFAAMREAVKTLGGDPEKVHPACPTDL |
| | | | | TVDHSLQIDFSKCAIQNAPNPGGGDLQKA |
| | | | | GKLSPLKVQPKKLPCRGQTTCRGSCDSGE |
| | | | | LGRNSGTFSSQIENTPILCPFHLQPVPEPET |
| | | | | VLKNQEVEFGRNRERLQFFKWSSRVFKN |
| | | | | VAGIPPGTGMAHQINLEYLSRVVFEEKDL |
| | | | | LFPDSVVGTDSHITMVNGLGILGWGVGGI |
| | | | | ETEAVMLGLPVSLTLPEVVGCELTGSSNP |
| | | | | FVTSIDVVLGITKHLRQVGVAGKFVEFFG |
| | | | | SGVSQLSIVDRTTIANMCPEYGAILSFFPV |
| | | | | DNVTLKHLEHTGFSKAKLESMETYLKAV |
| | | | | KLFRNDQNSSGEPEYSQVIQINLNSIVPSV |
| | | | | SGPKRPQDRVAVTDMKSDFQACLNEKVG |
| | | | | FKGFQIAAEKQKDIVSIHYEGSEYKLSHGS |
| | | | | VVIAAVISCTNNCNPSVMLAAGLLAKKA |
| | | | | VEAGLRVKLPYIRTSLSPGSGMVTHYLSSS |
| | | | | GVLPYLSKLGFEIVGYGCST*VGNTAPLS |
| | | | | DAVLNAVKQGDLVTCGILSGNKNFEGRL |
| | | | | CDCVRANYLASPPLVVAYAIAGTVNIDCQ |
| | | | | TEPLGTDPTGKNIYLHDIWPSREEVHRVE |
| | | | | EEHVILSMFKALKDKIEMGNKRWNSLEA |
| | | | | PDSVLFPWDLKSTYIRCPSFFDKLTKEPIA |
| | | | | LQA\IENAHVLLYLGDSVTT\DHISPA\KSIA |
| | | | | RNSAAAKYLTNRGLTPREFNSYGARRGN |
| | | | | DAVMTRGTFANIKLFNKFIGKPAPKTIHFP |
| | | | | SGQTLDVFEAAELYQKEGIPLIILAGKKYG |
| | | | | SGNSRDWAAKGPYLLGVKAVLAESYEKI |
| | | | | HKDHLIGIGIAPLQFLPGENADSLGLSGRE |
| | | | | TFSLTFPEELSPGITLNIQTSTGKVFSVIASF |
| | | | | EDDVEITLYKHGGLLNFVARKFS |
| 373 | B | 103 | 905 | XTSKSWLHGSIFGDINSSPSEDNWLKGTR |
| | | | | RLDTDHCNGNADDLDCSSLTDDWESGK |
| | | | | MNAESVITSSSSHIISQPPGGNSHSLSLQSQ |
| | | | | LTASERFQENSSDHSETRLLQEVFFQAILL |
| | | | | AVCLIISACARWFMGEILASVFTCSLMITV |
| | | | | AYVKSLFLSLASYFKTTACARFVKI |
| 374 | B | 103 | 905 | XTSKSWLHGSIFGDINSSPSEDNWLKGTR |
| | | | | RLDTDHCNGNADDLDCSSLTDDWESGK |
| | | | | MNAESVITSSSSHIISQPPGGNSHSLSLQSQ |
| | | | | LTASERFQENSSDHSETRLLQEVFFQAILL |
| | | | | AVCLIISACARWFMGEILASVFTCSLMITV |
| | | | | AYVKSLFLSLASYFKTTACARFVKI |
| 375 | B | 103 | 905 | XTSKSWLHGSIFGDINSSPSEDNWLKGTR |
| | | | | RLDTDHCNGNADDLDCSSLTDDWESGK |
| | | | | MNAESVITSSSSHIISQPPGGNSHSLSLQSQ |
| | | | | LTASERFQENSSDHSETRLLQEVFFQAILL |
| | | | | AVCLIISACARWFMGEILASVFTCSLMITV |
| | | | | AYVKSLFLSLASYFKTTACARFVKI |
| 376 | A | 40 | 999 | SRSCVCSQESFGGCCVSGLIAMGTKAQVE |
| | | | | RKLLCLFILAILLCSLALGSVTVHSSEPEVR |
| | | | | IPENNPVKLSCAYSGFSSPRVEWKFDQGD |
| | | | | TTRLVCYNNKITASYEDRVTFLPTGITFKS |
| | | | | VTREDTGTYTCMVSEEGGNSYGEVKVKL |
| | | | | IVLVPPSKPTVNIPSSATIGNRAVLTCSEQD |
| | | | | GSPPSEYTWFKDGIVMPTNPKSTRAFSNSS |
| | | | | YVLNPTTGELVFDPLSASDTGEYSCEARN |
| | | | | GYGTPMTSNAVRMEAVERNVGVIVAAVL |
| | | | | VTLILLGILVFGIWFAYSRGHFDRTKKGTS |
| | | | | SKKVIYSQPSARSEGEFKQTSSFLV |
| 377 | A | 52 | 448 | HPIVGLRRMGDFKACQFQEGEGRSVGGV |
| | | | | SRSP*WPSLRASPLSPTSSDSIPSGHPAPPTP |
| | | | | PQPPTQPLSEANSQSEGSLSLERRFPVT*P |
| | | | | WGTSLPFLSPPTPSAVLLARTLAYTKDGG |
| | | | | CGCGAELVLTPIK |
| 378 | B | 102 | 431 | MIIYRDLISHDEMFSDIYKIREIADGLCLEV |
| | | | | EGKMVSRTEGNIDDSLIGGNASAEGPEGE |
| | | | | GTESTVITGVDIVMNHHLQETSFTKEAYK |
| | | | | KYIKDYMKSIKGKLEEQRPDR |
| 379 | B | 14 | 419 | MRHPHRLQPGCRGMVPVPADPVPVQSAE |
| | | | | DLSLFLSTRCVVVLLSAELVQHFHKPALL |
| | | | | PLLQRAFHPPHRVVRLLCGVRDSEEFLDF |
| | | | | FPDWAHWQELTCDDTYVAAVKKAISEX |
| 380 | A | 115 | 644 | TTTMSSKKAKTKTTKKRPQRATSNVFAM |
| | | | | FDQSQIQEFKEAFNMIDQNRDGFIDKEDL |
| | | | | HDMLASLGKNPTDAYLDAMMNEAPGPIN |
| | | | | FTMFLTMFGEKLNGTDPEDVIRNAF/ASCF |
| | | | | DEEATGTIQEDYLRELLTTMGDRFTDEEV |
| | | | | DELYREAPIDKKGNFNYIEFTRILKHGAK |
| | | | | DKDD |
| 381 | A | 384 | 722 | PEETPLPTLPERGSLRTGWRRWGPSRAPG |
| | | | | ALPGMSRPTHPKAGAAAPCCPSPGLGND |
| | | | | DPPKSPSAPQTQGLRPPAPGIRESIPAQHPQ |
| | | | | HPRVWPPCTSLSHPRRSVPLAPQCP |
| 382 | C | 120 | 356 | MMYRTHCQRILDTVIRANFDEVQSFLLHF |
| | | | | WQGMPPHMLPVLGSSTVVNIVGVCDSIL |
| | | | | YKAISGVLMPTVLQALPDSLT |
| 383 | A | 1 | 1052 | MPGTCKCTGAEASRIWKGEDVCEYWGQ |
| | | | | RVVAFLAMVMGTHTYSHWPSCCPSKGQ |
| | | | | DTSEELLRWSTVPVPPLEPARPNRHPESCR |
| | | | | ASEDGPLNSRAISPWRYEPDKCRPHRLDR |
| | | | | DLNRLPQDLYHARCLCPHCVSLQTGSHM |
| | | | | DPRGNSELLYHNQTVFYRRPCHGEKGTH |
| | | | | KGYCLERRLYRVSLACGAVLVGPTKMLS |
| | | | | ARDRRDRHPEEGVVAELQGFAVDKAFLT |
| | | | | SHKGILLETELALTLIIFICFTASISAYMAA |
| | | | | ALLEFFITLAFLFLYATQYYQRFDRINWP |
| | | | | WLDFLRCVSAIIIFLVVSFAAVTSRDGAAI |
| | | | | AAFVFGIILVSIFAYDAFKIYRTEMAPGAS |
| | | | | QGDQQ |
| 384 | A | 1 | 381 | SRYSRVDDFVAEPSSAAERLCRHGYTME |
| | | | | RPDKAALNALQPPEFRNESSLASTLKTLLF |
| | | | | FTALMITVPIGLYFTTKSYIFEGALGMSNR |
| | | | | DSYFYAAIVAVVAVHVVLALFVYVAWN |
| | | | | EGSRQWREGKQD |
| 385 | A | 3 | 270 | KADVKNLSGKNRPVNSKIHDIFKGWALQ |
| | | | | PLDPDGRVKIWVYGVSGGAFLIMIFLIFTS |
| | | | | YLVCKKPKPHQSTPPQQKPLTLSYDGDLDM |
| 386 | A | 366 | 892 | PCVYSQFPAGEQCLKLHSPAEASPPALEA |
| | | | | SEAQTRKAPECGSGVPEVAGGSCPCLLLC |
| | | | | LPRHQAVPTQGPGTYSPCTSHQPHIFPRPA |
| | | | | APHHLGLLQNPHNAASCIQCLYPAGVATT |
| | | | | MPRRKAEGDAEGD/KAKVKDEPQRRPAK |
| | | | | LSAKPAPPNPEAKPKNAPGVTLSLRGTAT |
| | | | | RF |
| 387 | A | 1800 | 983 | IILLILTEDDGFNRSIHEVILKNITWYSERV |
| | | | | LTEISLGSLLILVVIRTIQYNMTRTRDKYL |
| | | | | DTNCLAALANMSAQFRSLHQYAAQRIISL |
| | | | | FSLLSKKHNKVLEQATQSLRGSLSSNDVP |
| | | | | LPDYAQDLNVIEEVIRMMLEIINSCLTNSL |
| | | | | HHNPNLVYALLYKRDLFEQFRTHPSFQDI |
| | | | | MQNIDLVISFFSSRLLQAGAELSVERVLEII |
| | | | | KQGVVALPKDRLKKFPELKFKYVEEEQPE |
| | | | | EFFIPYVWSLVYNSASRPCTGIHRTSSCSP |
| | | | | WIPD |
| 388 | A | 148 | 449 | NLPGWTVLFLSVLGLLASRAVSALSSLFA |
| | | | | AEVFPTVIRGAGLGLVLGAGFLGQAAGPL |
| | | | | DTLHGRQGFFLQQVVFASLAVLALLCVLL |
| | | | | LPESRSRGLPQSL |
| 389 | A | 641 | 1310 | TCTYKYLMGWIRGRRSRHSWEMSEFHNY |
| | | | | NLDLKKSDFSTRWQKQRCPVVKSKCREN |
| | | | | ASPFFFCCFIAVAMGIRFIIMVAIWSAVFL |
| | | | | NSLFNQEVQIPLTESYCGPCPKNWICYKN |
| | | | | NCYQFFDESKNWYESQASCMSQNASLLK |
| | | | | VYSKEDQDLLKLVKSYHWMGLVHIPTNG |
| | | | | SWQWEDGSILSPNLLTIIEMQKGDCALYA |
| | | | | SSFKGYIENCSTPNTYICMQRTV |
| 390 | A | 642 | 290 | VGERLTLPGLVSADNGTYTCEASNKHGH |
| | | | | ARALYVLVVYDPGAVVEAQTSVPYAIVG |
| | | | | GILALLVFLIICVLVGMVWCSVRQKGSYL |
| | | | | THEASGLDEQGEAREAFLNGSDGHKRKE |
| | | | | EFFI |
| 391 | A | 182 | 703 | CCCNVFNCFSLSLQTWALHSLSLIIDSAGP |
| | | | | LYYVHVEPTLSLIIIVVVNVPPTHAEVHQS |
| | | | | LGRCLNALITTLGPELQGNSTSISTLRTSCL |
| | | | | LGCAVMQDNPDCLVQAQAISCLQQLHMF |
| | | | | APRHVNLSSLVSCLCVNLCSPYLLLRRAV |
| | | | | LACLRQLVQREAAEVSEHAVMLAKDS |
| 392 | A | 221 | 858 | EMSERWKRRGNSTRTSSLASGAGDPEPDL |
| | | | | WIIQPQELVLGTTGDTVFLNCTVLGDGPP |
| | | | | GPIRWFQGAGLSREAIYNFGGISHPKATA |
| | | | | VQASNNDFSILLQNVSSEDAGTYYCVKFQ |
| | | | | RKPNRQYLSGQGTSLKVKAKSTSSKEAEF |
| | | | | TSEPATEMSPTGLLVVFAPVVLGLKAITL |
| | | | | AALLLALATSRRSPGQEDVKTTGPAGAM |
| | | | | NTLSWSKGQE |
| 393 | A | 674 | 1228 | APLESLKPPPNVPPSYELRVVIWNTEDVV |
| | | | | LDDENPLTGEMSSDIYVKSWVKGLEHDK |
| | | | | QETDVHFNSLTGEGNFNWRFVFRFDYLPT |
| | | | | EREVSVWRRSGPFALEEAEFRQPAVLVLQ |
| | | | | VWDYDRISANDFLGSLELQLPDMVRGAR |
| | | | | GPELCSVQLARNGAGPRCNLFRCRRLRG |
| | | | | WWPVVKLKEAEDVE |
| 394 | A | 2522 | 1737 | GPRARPPVLTRRSSWPPRRSRGSMRFKNR |
| | | | | FQRFMNHRAPANGRYKPTCYEHAANCYT |
| | | | | HAFLIVPAIVGSALLHRLSDDCWEKITAWI |
| | | | | YGMGLCALFIVSTVFHIVSWKKSHLRTVE |
| | | | | HCFHMCDRMVIYFFIAASYAPWLNLREL |
| | | | | GPLASHMRWFIWLMAAGGTIYVFLYHEK |
| | | | | YKGVELFFYLTMGFSPALVVTSMNNTDG |
| | | | | LQELACGGLIYCLGVVFFKSDGIIPFAHAI |
| | | | | WHLFVATAAAVHYYAIWKYLYRSPTDF |
| | | | | MRHL |
| 395 | A | 513 | 273 | KTQETHIYISEHIFFPFLQGFGNLPICMAKT |
| | | | | DLSLSHQPDKKGVPSDFILPISDVRASIGA |
| | | | | GFIYPLVGTGSRESPLWL |
| 396 | A | 1 | 2073 | MKPCAHSWNAELSRNIIRHSFNLVMVAA |
| | | | | SQVAVSQLLGSYEILLLVSIELMFCFGLGY |
| | | | | FFIPMQEWPNTYGERVFVDVESSVFKWN |
| | | | | HKCLHKTEAERDYTKKRLKLCGHKPGNA |
| | | | | VGQQKLEEARNRFFTRAPGGSAALPTLRF |
| | | | | QPSDTDFRLLASRTILTFETKNPSELAERL |
| | | | | RSVCGNQSNAYARLLEYRLNALRGLWNA |
| | | | | QRQLALEEQHERESSGDEETLALLKRQGL |
| | | | | LQQPEQAPFTSRMGLLLVFPLIQSQSRTDP |
| | | | | SLCNITAEVLLNCLRDCQPLSLTKEPADCL |
| | | | | NGIETLLCSWLEETSDTGRHIPHKQKENA |
| | | | | AAALVALACARGFVYCRNEELEPGWVAF |
| | | | | GSGSLLHRPVSFDNKPHSLFQVIDQNTLQ |
| | | | | VCQVVPMPANHLPIGSTMSTVHLSSDGTY |
| | | | | FYWIWSPASLNEKTPKGHSVFMDIFELVT |
| | | | | LKGKKAKGKKVAPAPAVVKKQEAKKVV |
| | | | | NSLFEKR\DIQPKRELTYFVKW/PRYVRLQ |
| | | | | QQRAILYKQLKVPPAINQFTQALNCQTVT |
| | | | | QLLKLAHKYRPETKQEKKQRLLAQAEKK |
| | | | | AAGKGGVPTKRPPALRAGVNTITTLVENK |
| | | | | KAQLVVIAHDVDSIELVVFLPALCCKMGV |
| | | | | PYCIIKGKARLGRLVHRKTCTTVAFTQVN |
| | | | | LEDKGALAKLVEGIRTNDNDRYDEICCH |
| | | | | WGGNILGPKSVACIAKLEKAKAKELATK |
| | | | | LG |
| 397 | A | 145 | 1752 | SELLLTFSFRLRMTQNKLKLCSKANVYTE |
| | | | | VPDGGWGWAVAVSFFFVEVFTYGIIKTFG |
| | | | | VFFNDLMDSFNESNSRISWIISICVFVLTFS |
| | | | | APLATVLSNRFGHRLVVMLGGLLVSTGM |
| | | | | VAASFSQEVSHMYVAIGIISGLGYCFSFLP |
| | | | | TVTILSQYFGKRRSIVTAVASTGECFAVFA |
| | | | | FAPAIMALKERIGWRYSLLFVGLLQLNIVI |
| | | | | FGALLRPIFIRGPASPKIVIQENRKEAQYM |
| | | | | LENEKTRTSIDSIDSGVELTTSPKNVPTHT |
| | | | | NLELEPKADMQQVLVKTSPRPSEKKAPLL |
| | | | | DFSILKEKSFICYALFGLFATLGFFAPSLYII |
| | | | | PLGISLGIDQDRAAFLLSTMAIAEVFGRIG |
| | | | | AGFVLNREPIRKIYIELICVILLTVSLFAFTF |
| | | | | ATEFWGLMSCSIFFGFMVGTIGG\LTFHCL |
| | | | | LRMMSWALQKMSSAAGVYIFIQSIAGLA |
| | | | | GPPLAGLLVDQSKIYSRAFYSCAAGMALA |
| | | | | AVCLALVRPCKMGLCQHHHSGETKVVSH |
| | | | | RGKTLQDIPEDFLEMDLAKNEHRVHVQM |
| | | | | EPV |
| 398 | A | 1 | 520 | PPRAAELAPSPPADMFESKNGPEYASFFPV |
| | | | | MGASAAMVFSALGPAYGTTKSGTGISAM |
| | | | | SVIRPEQIMKSIIPVVMAGIIAISGLVVAVLI |
| | | | | ANSLECSVYADDLEMSFLFPRMFIYKDLA |
| | | | | CSCVSGTALVSQLFITLVRGSPCGFLLFRL |
| | | | | PGWNRPPRRARGPARNCVPQSFWM |
| 399 | A | 3 | 449 | HASGFVVQGSNGEFPFLTSSERLEVVSRV |
| | | | | RQAMPMNRLLLAGSGCESTQATVEMTVS |
| | | | | MAQVGADAAMVVTPCYYRGRMSSAALI |
| | | | | HHYTKVADLSPIPVVLYSVPANTGLDLPV |
| | | | | DAVVTLSQHPNIVGMKDSGGDVTRIGLIV |
| | | | | HKTQEA |
| 400 | A | 35 | 637 | MPIGLRGLMIAVMLAALMSSLTSIFNSSST |
| | | | | LFTMDIWRRLRPRSGERELLLVGRLVIVA |
| | | | | LIGVSVAWIPVLQDSNSGQLFIYMQSVTSS |
| | | | | LAPPVTAVFVLGVFWRRANEQGAFWGLI |
| | | | | AGLVVGATRLVLEFLNPAPPCGEPDTRPA |
| | | | | VLGSIHYLHFAVALFALSGAVVVAGSLLT |
| | | | | PPPQSVQIENLTWWTLAQDVPLGTKA |
| 401 | A | 1 | 1128 | YNRAMFHPHAVNKIALSLNNKNP\RSKVL |
| | | | | FLELLAAVCLVRGGHKLFYLAFDNFKEV |
| | | | | CGEKQRFEKLMEHFRNEDNNIDFMVASM |
| | | | | QFINIVVHSVEDMNFRVHLQYEFTKLGLD |
| | | | | EYLDKLKHTESDKL\QVQIQAYLDNVFDV |
| | | | | GALLEDAETKNAALERVEELEENISHLSE |
| | | | | KLQDTENEAMSKIVELEKQLMQRNKELD |
| | | | | VVREIYKDANTQVHTLRKMVKEKEEAIQ |
| | | | | RQSTLEKKIHELEKQGTIKIQKKGDGDIAI |
| | | | | LPVVASGTLSMGSEVVAGNSVGPTMGAA |
| | | | | SSGPLPPPPPPLPPSSDTPETVQNGPVTPPM |
| | | | | PPPPTPPPPPPPPPPPPPPPPLPGPAAETVPA |
| | | | | PPLAPPLPSAPPLPGTSSPTVVFNSGLA |
| 402 | A | 53 | 1004 | NSAKKNVSSPTSSNKEVVMRNDQNNGD |
| | | | | MKPFQNFTTIPITQALNYNLSKEGHLEKEP |
| | | | | WNAFSHHGPVNVSINGIPCILFWAKRIMIK |
| | | | | FKNQTWLDLTDEPFGQKVTVDPDNSNCS |
| | | | | EESARLSLKLGDAGNPRSLAIRFILTNYNK |
| | | | | LSIQSWFSLRRVEIISNNSIQAVFNPTGVYA |
| | | | | PSGYSYRCQRVGSLQQDQALLLPSDTDD |
| | | | | GSSLWEVTFIDFQIQGFAIKGGRFTKAQDC |
| | | | | ASSFSPAFLIGLAMSLILLLVLAYALHMLI |
| | | | | YLRYLDQQYDLIASPAHFSQLKARDTAEE |
| | | | | KELLRSQGAECYKLRSQQISKIYV |
| 403 | A | 1660 | 657 | RRGIRDSGIEYLLDQTDVLVVGVLGLQGT |
| | | | | GKSMVMSLLSANTPEEDQRTYVFRAQSA |
| | | | | EMKERGGNQTSGIDFFITQERIVFLDTQPIL |
| | | | | SPSILDHLINNDRKLPPEYNLPHTYVEMQS |
| | | | | LQIAAFLFTVCHVVIVVQDWFTDLSLYRF |
| | | | | LQTAEMVKPSTPSPSHESSSSSGSDEGTEY |
| | | | | YPHLVFLQNKARREDFCPRKLRQMHLMI |
| | | | | DQLMAHSHLRYKGTLSMLQCNVFPGLPP |
| | | | | DFLDSEVNLFLVPFMDSEAESENPPRAGP |
| | | | | GSSPLFSLLPGYRGHPSFQSLVSKLRSQVM |
| | | | | SMARPQLSHTILTEKNWFHYAARIWDGV |
| | | | | RKSSALAEYSRLLA |
| 404 | A | 2 | 479 | IKIRSLGCLIAAMILLSSLTAHPILRLIITMEI |
| | | | | SFFSFFILLYSFAIHRYIPFILWPIPDLFNDLI |
| | | | | ACAFLVGAVVFAVRSRRSMNLHYLLAVI |
| | | | | LIGAAGVFAFIDVCLQRNHFRGKKAKKH |
| | | | | MLVPPPGKEKGPQQGKGPEPAKPPEPGKP |
| | | | | PGPAKGKK*LGCLIAAMILLSSLTAHPILR |
| | | | | LIITMEISFFSFFILLYSFAIHRYIPFILWPIPD |
| | | | | LFNDLIACAFLVGAVVFAVRSRRSMNLH |
| | | | | YLLAVILIGAAGVFAFIDVCLQRNHFRGK |
| | | | | KAKKHMLVPPPGKEKGPQQGKGPEPAKP |
| | | | | PEPGKPPGPAKGKK |
| 405 | A | 1 | 1527 | MAITLRELNGLSYEEIAAIMDCPALTIAGY |
| | | | | WIRVLGMQKEQLSALMDGETLDSELLNE |
| | | | | LAHNPEMQKTWESYHLIRDSMRGDTPEV |
| | | | | LHFDISSRVMAAIEEEPVFLRDIICEYNCAS |
| | | | | IPYERDRIMQSVTKIVNAQLIRIELAGKHTI |
| | | | | DVLMERLSVRIALIKKLLRLFFPLSLRVRF |
| | | | | LLATAAVVLVLSLAYGMVALIGYSVSFD |
| | | | | KTTFRLLRGESNLFYTLAKWENNKLHVE |
| | | | | LPENIDKQSPTMTLIYDENGQLLWAQRD |
| | | | | MKGWTNECILVLSGDHSIQQQLQEVRED |
| | | | | DDDAEMTHSVAVNVYPATSRMPKLTIVV |
| | | | | VDTIPVELKSSYMGLCGQPTNKDVLRRM |
| | | | | KKRYPTTFVMVVMLASYFLISMFGGVMV |
| | | | | FVFGITFPLLCMEKIVSTKAILDKNTNQCK |
| | | | | GMCKGIRTLKSCLCYLINGSSIVEVQDSW |
| | | | | LMGAIKFQQESRLLHHRLLSAIRIKQKEEE |
| | | | | ERNKKEKKDKELESIFPSYGPFHYFKSKTI |
| | | | | KEWAPFYGYDFYPLVL |
| 406 | A | 1 | 1148 | TRYDPRVRRDRCGTSDPYVKFKLNGKTL |
| | | | | YKSKVIYKNLNPVWDEIVVLPIQSLDQKL |
| | | | | RVKVYDRDLTTSDFMGSAFVILSDLELNR |
| | | | | TTEHILKLEDPNSLEDDMGVIVLNLNLVV |
| | | | | KQGDFKRHRWSNRKRLSASKSSLIRNLRL |
| | | | | SESLKKNQLWNGIISITLLEGKNVSGGSMT |
| | | | | EMFVQLKLGDQRYKSKTLCKSANPQWQE |
| | | | | QFDFHYFSDRMGILDIEVWGKDNKKHEE |
| | | | | RLGTCKVDISALPLKQANCLELPLDSCLG |
| | | | | ALLMLVTLTPCAGVSVSDLCVCPLADLSE |
| | | | | RKQITQRYCLQNSLKDVKDVGILQVKVL |
| | | | | KAADLLAADFSGKSDPFCLLELGNDRLQT |
| | | | | HTVYKNLNPEWNKVFTFPIKDIHDVLEVT |
| | | | | VFDEDGDK |
| 407 | A | 1138 | 1735 | LPSLSLRLLHNCAPLVLDKTISFIICIITRPSI |
| | | | | MTEIR*YTLHGVNARNQNSRLAATKPSSV |
| | | | | RSGLFQLSSSSARQP/TPQRPAPRAARLPRP |
| | | | | PPGPRPPPPATPRPPPPQLPALPPPAAAALR |
| | | | | GMPGAVAATAAPAPRRQEPGIPPRRAPEA |
| | | | | PGSPSSAVLPGRDGAGRARGRAWVWVPP |
| | | | | RAGRRWRQVPERGAHRGAQ |
| 408 | A | 1138 | 1735 | LPSLSLRLLHNCAPLVLDKTISFIICIITRPSI |
| | | | | MTEIR*YTLHGVNARNQNSRLAATKPSSV |
| | | | | RSGLFQLSSSSARQP/TPQRPAPRAARLPRP |
| | | | | PPGPRPPPPATPRPPPPQLPALPPPAAAALR |
| | | | | GMPGAVAATAAPAPRRQEPGIPPRRAPEA |
| | | | | PGSPSSAVLPGRDGAGRARGRAWVWVPP |
| | | | | RAGRRWRQVPERGAHRGAQ |
| 409 | A | 2 | 376 | EVSLSTVPASGHHSGPSLHAENHTSQTFT |
| | | | | QHFLPQSQKMHKEEHEVAVLGAPPSTILP |
| | | | | RSTVINIHSETSVPDHVVWSLFNTLFLNW |
| | | | | CCLGFIAFAYSVKSMDRKMVGDVTGAQA |
| | | | | YASTAKCLNI |
| 410 | A | 1 | 794 | RIVFEQDHAKLGTRAGTRRDSDMAGHTQ |
| | | | | QPSGRGNPRPAPSPSPVPGTVPGASERVAL |
| | | | | KKEIGLLSACTIIIGNIIGSGIFISPKGVLEHS |
| | | | | GSVGLALFVWVLGGGVTALGSLCYAELG |
| | | | | VAIPKSGGDYAYVTEIFGGLAGFLLLWSA |
| | | | | VLIMYPTSLAVISMTFSNYVLQPVFPNCIP |
| | | | | PTTASRVLSMACLMLLTWVNSSSVRWAT |
| | | | | RIQDMFTGGKLLALSLIIGVGLLQIFQGHF |
| | | | | EELRPSNAFAFWMTPSVGHLALAFLQGS |
| 411 | A | 167 | 853 | SMDVKERRPYCSLTKSRREKERRYTNSSA |
| | | | | DNEECRVPTQKSYSSSETLKAFDHDSSRL |
| | | | | LYGNRVKDLVHREADEFTRQGQNFTLRQ |
| | | | | LGVCEPATRRGLAFCAEMGLPHRGYSISA |
| | | | | GSDADTENEAVMSPEHAMRLWGRGVKS |
| | | | | GRSSCLSSRSNSALTLTDTEHENKSDSENG |
| | | | | KFSFWLYNVGIQCFCLFWLTPRGGDVFLS |
| | | | | LFPLILLSLSFLSISFCFNVVELKKCP |
| 412 | A | 905 | 177 | SPSGLQLPQYSAAELQSPAAPGLRHVDSA |
| | | | | GWGRRRAGPAGSSGYRAGYSSSTPHDAN |
| | | | | MAAQKDQQKDAEAEGLSGTTLLPKLIPSG |
| | | | | AGREWLERRRATIRPWSTFVDQQRFSRPR |
| | | | | NLGELCQRLVRNVEYYQSNYVFVFLGLIL |
| | | | | YCVVTSPMLLVALAVFFGACYILYLRTLE |
| | | | | SKLVLFGREVSPAHQYALAGGISFPFFWL |
| | | | | AGAGSAVFWVLGATLVVIGSHAAFHQIE |
| | | | | AVDGEELQMEPV |

[0472] TABLE 9

| SEQ ID NO: | SEQ ID NO: | SEQ ID NO: | SEQ ID NO: | Identification of Priority |
|---|---|---|---|---|
| of full-length | of full-length | of contig | of contig | Application that contig nucleotide |
| nucleotide | peptide | nucleotide | peptide | sequence was filed (Attorney |
| sequence | sequence | sequence | sequence | Docket No._SEQ ID NO.) * |
| 1 | 125 | | | |
| 2 | 126 | 249 | 331 | 789_2490 |
| 3 | 127 | 250 | 332 | 784_2340 |
| 4 | 128 | 251 | 333 | 790_2827 |
| 5 | 129 | 252 | 334 | 787_9834 |
| 6 | 130 | 253 | 335 | 784_1594 |
| 7 | 131 | 254 | 336 | 787_7563 |
| 8 | 132 | | | |
| 9 | 133 | 255 | 337 | 784_969 |
| 10 | 134 | 256 | 338 | 788_13029 |
| 11 | 135 | | | |
| 12 | 136 | | | |
| 13 | 137 | 257 | 339 | 784_3978 |
| 14 | 138 | 258 | 340 | 784_3848 |
| 15 | 139 | | | |
| 16 | 140 | 259 | 341 | 785_1465 |
| 17 | 141 | 260 | 342 | 787_7763 |
| 18 | 142 | | | |
| 19 | 143 | | | |
| 20 | 144 | | | |
| 21 | 145 | | | |
| 22 | 146 | 261 | 343 | 787_2258 |
| 23 | 147 | 262 | 344 | 787_2584 |
| 24 | 148 | 263 | 345 | 784_8266 |
| 25 | 149 | 264 | 346 | 784_1397 |
| 26 | 150 | 265 | 347 | 784_8164 |
| 27 | 151 | | | |
| 28 | 152 | | | |
| 29 | 153 | | | |
| 30 | 154 | 266 | 348 | 784_2498 |
| 31 | 155 | 267 | 349 | 787_5189 |
| 32 | 156 | | | |
| 33 | 157 | 268 | 350 | 787_10359 |
| 34 | 158 | | | |
| 35 | 159 | | | |
| 36 | 160 | 269 | 351 | 790_17261 |
| 37 | 161 | 270 | 352 | 784_9629 |
| 38 | 162 | 271 | 353 | 784_9102 |
| 39 | 163 | 272 | 354 | 784_9102 |
| 40 | 164 | 273 | 355 | 784_8867 |
| 41 | 165 | 274 | 356 | 787_3900 |
| 42 | 166 | 275 | 357 | 787_9753 |
| 43 | 167 | 276 | 358 | 787_4766 |
| 44 | 168 | 277 | 359 | 789_3521 |
| 45 | 169 | 278 | 360 | 784_8097 |
| 46 | 170 | | | |
| 47 | 171 | 279 | 361 | 784_735 |
| 48 | 172 | 280 | 362 | 784_4418 |
| 49 | 173 | 281 | 363 | 784_4418 |
| 50 | 174 | | | |
| 51 | 175 | | | |
| 52 | 176 | 282 | 364 | 784_1006 |
| 53 | 177 | 283 | 365 | 787_3050 |
| 54 | 178 | | | |
| 55 | 179 | | | |
| 56 | 180 | 284 | 366 | 791_2053 |
| 57 | 181 | | | |
| 58 | 182 | 285 | 367 | 788_6860 |
| 59 | 183 | 286 | 368 | 785_108 |
| 60 | 184 | 287 | 369 | 784_8348 |
| 61 | 185 | 288 | 370 | 784_8679 |
| 62 | 186 | 289 | 371 | 790_19249 |
| 63 | 187 | 290 | 372 | 784_5566 |
| 64 | 188 | 291 | 373 | 790_3027 |
| 65 | 189 | 292 | 374 | 790_3027 |
| 66 | 190 | 293 | 375 | 790_3027 |
| 67 | 191 | | | |
| 68 | 192 | | | |
| 69 | 193 | 294 | 376 | 784_7116 |
| 70 | 194 | 295 | 377 | 789_1658 |
| 71 | 195 | 296 | 378 | 790_26168 |
| 72 | 196 | 297 | 379 | 790_3240 |
| 73 | 197 | | | |
| 74 | 198 | 298 | 380 | 784_6361 |
| 75 | 199 | 299 | 381 | 784_297 |
| 76 | 200 | 300 | 382 | 790_13930 |
| 77 | 201 | | | |
| 78 | 202 | 301 | 383 | 790_29538 |
| 79 | 203 | | | |
| 80 | 204 | | | |
| 81 | 205 | | | |
| 82 | 206 | | | |
| 83 | 207 | 302 | 384 | 784_7603 |
| 84 | 208 | 303 | 385 | 787_5453 |
| 85 | 209 | 304 | 386 | 790_23838 |
| 86 | 210 | | | |
| 87 | 211 | 305 | 387 | 784_5422 |
| 88 | 212 | 306 | 388 | 784_2530 |
| 89 | 213 | 307 | 389 | 787_7257 |
| 90 | 214 | 308 | 390 | 784_5473 |
| 91 | 215 | 309 | 391 | 784_1793 |
| 92 | 216 | 310 | 392 | 784_10027 |
| 93 | 217 | | | |
| 94 | 218 | | | |
| 95 | 219 | | | |
| 96 | 220 | 311 | 393 | 787_732 |
| 97 | 221 | 312 | 394 | 784_8556 |
| 98 | 222 | | | |
| 99 | 223 | 313 | 395 | 787_5766 |
| 100 | 224 | 314 | 396 | 790_4531 |
| 101 | 225 | 315 | 397 | 784_6708 |
| 102 | 226 | 316 | 398 | 790_19316 |
| 103 | 227 | 317 | 399 | 784_1784 |
| 104 | 228 | 318 | 400 | 785_470 |
| 105 | 229 | 319 | 401 | 787_1368 |
| 106 | 230 | 320 | 402 | 789_6192 |
| 107 | 231 | 321 | 403 | 784_4498 |
| 108 | 232 | | | |
| 109 | 233 | 322 | 404 | 789_6042 |
| 110 | 234 | | | |
| 111 | 235 | 323 | 405 | 790_4461 |
| 112 | 236 | | | |
| 113 | 237 | 324 | 406 | 784_2675 |
| 114 | 238 | 325 | 407 | 789_4591 |
| 115 | 239 | 326 | 408 | 789_4591 |
| 116 | 240 | 327 | 409 | 790_13145 |
| 117 | 241 | | | |
| 118 | 242 | | | |
| 119 | 243 | | | |
| 120 | 244 | 328 | 410 | 784_10141 |
| 121 | 245 | 329 | 411 | 784_10225 |
| 122 | 246 | 330 | 412 | 784_7722 |
| 123 | 247 | | | |
| 124 | 248 | | | |

[0473] 784_XXX=SEQ ID NO: XXX of Attorney Docket No. 784, U.S. Ser. No. 09/488,725 filed Jan. 21, 2000, the entire disclosure of which, including sequence listing, is incorporated herein by reference. This application is the parent application of a continuation-in-part application bearing Attorney Docket No. 784CIP, U.S. application Ser. No. 09/552,317, filed Apr. 25, 2000, which in turn is a parent application of continuation-in-part application bearing Attorney Docket No. 784CIP3A/PCT, PCT Serial No. PCT/US00/35017 filed Dec. 22, 2000, both of which are incorporated herein by reference in their entirety, including Tables, and Sequence Listing.

[0474] 85_XXX=SEQ ID NO: XXX of Attorney Docket No. 785, U.S. Ser. No. 09/491,404 filed Jan. 25, 2000, the entire disclosure of which, including sequence listing, is incorporated herein by reference. This application is the parent application of a continuation-in-part application bearing Attorney Docket No. 785CIP3/PCT, PCT Serial No. PCT/US01/02623 filed Jan. 25, 2001, which is incorporated herein by reference in its entirety, including Tables, and Sequence Listing.

[0475] 787_XXX=SEQ ID NO: XXX of Attorney Docket No. 787, U.S. Ser. No. 09/496,914 filed Feb. 03, 2000, the entire disclosure of which, including sequence listing, is incorporated herein by reference. This application is the parent application of a continuation-in-part application bearing Attorney Docket No. 787CIP, U.S. application Ser. No. 09/560,875, filed Apr. 27, 2000, which in turn is a parent application of continuation-in-part application bearing Attorney Docket No. 787CIP3/PCT, PCT Serial No. PCT/US01/03800 filed Feb. 5, 2001, both of which are incorporated herein by reference in their entirety, including Tables, and Sequence Listing.

[0476] 788_XXX=SEQ ID NO: XXX of Attorney Docket No. 788, U.S. Ser. No. 09/515,126 filed Feb. 28, 2000, the entire disclosure of which, including sequence listing, is incorporated herein by reference. This application is the parent application of a continuation-in-part application bearing Attorney Docket No. 788CIP, U.S. application Ser. No. 09/577,409, filed May 18, 2000, which in turn is a parent application of continuation-in-part application bearing Attorney Docket No. 788CIP3/PCT, PCT Serial No. PCT/US01/04927 filed Feb. 26, 2001, both of which are incorporated herein by reference in their entirety, including Tables, and Sequence Listing.

[0477] 789_XXX=SEQ ID NO: XXX of Attorney Docket No. 789, U.S. Ser. No. 09/519,705 filed Mar. 07, 2000, the entire disclosure of which, including sequence listing, is incorporated herein by reference. This application is the parent application of a continuation-in-part application bearing Attorney Docket No. 789CIP, U.S. application Ser. No. 09/574,454, filed May 19, 2000, which in turn is a parent application of continuation-in-part application bearing Attorney Docket No. 789CIP3/PCT, PCT Serial No. PCT/US01/04941 filed Mar. 5, 2001, both of which are incorporated herein by reference in their entirety, including Tables, and Sequence Listing.

[0478] 790_XXX=SEQ ID NO: XXX of Attorney Docket No. 790, U.S. Ser. No. 09/540,217 filed Mar. 31, 2000, the entire disclosure of which, including sequence listing, is incorporated herein by reference. This application is the parent application of a continuation-in-part application bearing Attorney Docket No. 790CIP, U.S. application Ser. No. 09/649,167, filed Aug. 23, 2000, which in turn is a parent application of continuation-in-part application bearing Attorney Docket No. 790CIP3/PCT, PCT Serial No. PCT/US01/08631 filed Mar. 30, 2001, both of which are incorporated herein by reference in their entirety, including Tables, and Sequence Listing.

[0479] 791_XXX=SEQ ID NO: XXX of Attorney Docket No. 791, U.S. Ser. No. 09/552,929 filed Apr. 18, 2000, the entire disclosure of which, including sequence listing, is incorporated herein by reference. This application is the parent application of a continuation-in-part application bearing Attorney Docket No. 791CIP, U.S. application Ser. No. 09/770,160, filed Jan. 26, 2001, which in turn is a parent application of continuation-in-part application bearing Attorney Docket No. 791CIP3/PCT, PCT Serial No. PCT/US01/8656 filed Apr. 8, 2001, both of which are incorporated herein by reference in their entirety, including Tables, and Sequence Listing.

TABLE 10

| | Number of | Position of |
|---|---|---|
| | Transmembrane | Transmembrane |
| SEQ ID NO: | Regions | Region::Scores |
| 125 | 1 | 100-115:1952 |
| 126 | 1 | 732-749:2593 |
| 127 | 1 | 181-201:2410 |
| 128 | 2 | 53-68:1828 |
| | | 132-149:2533 |
| 129 | 2 | 53-69:2959 |
| | | 121-140:2878 |
| 130 | 1 | 407-429:3163 |
| 131 | 1 | 536-560:2906 |
| 132 | 1 | 63-82:2545 |
| 133 | 5 | 86-102:1766 |
| | | 189-205:2721 |
| | | 229-244:1878 |
| | | 273-300:1714 |
| | | 385-405:1946 |
| 134 | 1 | 629-645:2430 |
| 135 | 1 | 59-75:2149 |
| 136 | 1 | 306-332:2773 |
| 137 | 1 | 118-136:2329 |
| 138 | 2 | 98-113:2861 |
| | | 220-243:2391 |
| 139 | 1 | 151-169:2618 |
| 140 | 2 | 94-110:2524 |
| | | 124-146:2138 |
| 141 | 1 | 73-87:2180 |
| 142 | 1 | 206-226:2584 |
| 143 | 1 | 402-419:2096 |
| 144 | 1 | 343-361:1953 |
| 145 | 1 | 132-154:2199 |
| 146 | 1 | 590-613:2402 |
| 147 | 2 | 89-105:1748 |
| | | 155-173:2433 |
| 148 | 1 | 201-222:2190 |
| 149 | 4 | 254-277:2256 |
| | | 317-332:1771 |
| | | 442-460:2005 |
| | | 530-544:2110 |
| 150 | 2 | 169-186:1866 |
| | | 239-259:2042 |
| 151 | 1 | 63-77:1794 |
| 152 | 1 | 227-248:3456 |
| 153 | 1 | 133-148:2558 |
| 154 | 3 | 435-453:1849 |
| | | 505-526:2495 |
| | | 697-712:2057 |
| 155 | 1 | 317-340:2214 |
| 156 | 1 | 173-192:2637 |
| 157 | 1 | 63-79:1933 |
| 158 | 1 | 124-146:3384 |
| 159 | 3 | 82-102:2213 |
| | | 115-135:1769 |
| | | 160-185:2317 |
| 160 | 1 | 312-329:2354 |
| 161 | 2 | 116-131:3056 |
| | | 188-209:2254 |
| 162 | 6 | 48-71:1708 |
| | | 174-196:2300 |
| | | 237-254:1918 |
| | | 359-378:1887 |
| | | 413-435:1864 |
| | | 501-518:2625 |
| 163 | 6 | 136-159:1708 |
| | | 262-284:2300 |
| | | 325-342:1918 |
| | | 447-466:1887 |
| | | 501-523:1864 |
| | | 589-606:2625 |
| 164 | 1 | 352-376:2946 |
| 165 | 3 | 106-125:2854 |
| | | 226-241:1973 |
| | | 277-300:2759 |
| 166 | 4 | 85-105:2047 |
| | | 208-225:1907 |
| | | 309-330:2122 |
| | | 454-471:2461 |
| 168 | 1 | 60-75:2189 |
| 170 | 3 | 192-214:1705 |
| | | 236-259:1933 |
| | | 436-453:2349 |
| 171 | 1 | 459-477:1896 |
| 172 | 1 | 144-159:3028 |
| 173 | 1 | 144-159:3028 |
| 174 | 1 | 436-455:2525 |
| 175 | 1 | 705-724:2525 |
| 182 | 2 | 93-108:2014 |
| | | 249-264:2324 |
| 183 | 5 | 145-165:2633 |
| | | 316-331:2180 |
| | | 399-412:1770 |
| | | 481-496:2328 |
| | | 541-560:2589 |
| 184 | 1 | 73-92:1951 |
| 186 | 1 | 85-103:2195 |
| 188 | 1 | 160-176:2085 |
| 189 | 1 | 256-272:2085 |
| 190 | 1 | 210-226:2085 |
| 191 | 1 | 63-94:3259 |
| 192 | 2 | 184-201:2183 |
| | | 245-262:1812 |
| 193 | 1 | 276-295:3080 |
| 195 | 1 | 179-194:2620 |
| 199 | 1 | 111-129:2519 |
| 201 | 1 | 169-190:2680 |
| 202 | 3 | 61-82:2141 |
| | | 99-134:1715 |
| | | 119-139:2765 |
| 203 | 1 | 65-85:1713 |
| 204 | 3 | 123-137:2644 |
| | | 190-218:2074 |
| | | 300-314:2588 |
| 205 | 2 | 98-123:2354 |
| | | 270-295:2148 |
| 206 | 1 | 77-92:1791 |
| 207 | 1 | 68-88:2672 |
| 208 | 1 | 1524-1547:2939 |
| 210 | 1 | 95-113:2958 |
| 212 | 2 | 92-107:1923 |
| | | 162-178:2760 |
| 213 | 1 | 71-94:1835 |
| 214 | 1 | 379-403:3221 |
| 216 | 1 | 152-182:1795 |
| 218 | 3 | 201-217:2437 |
| | | 338-353:1761 |
| | | 449-466:2589 |
| 219 | 2 | 99-114:1754 |
| | | 108-130:2731 |
| 220 | 1 | 1177-1193:3038 |
| 221 | 1 | 95-111:2301 |
| 222 | 2 | 205-227:1715 |
| | | 307-322:1735 |
| 223 | 1 | 308-330:2431 |
| 225 | 5 | 92-107:1734 |
| | | 298-311:2063 |
| | | 363-378:1720 |
| | | 382-399:1988 |
| | | 453-471:2040 |
| 226 | 2 | 56-75:2481 |
| | | 127-148:2269 |
| 227 | 1 | 228-251:1822 |
| 228 | 4 | 97-115:1903 |
| | | 177-194:1919 |
| | | 889-905:2063 |
| | | 988-1008:2027 |
| 230 | 1 | 223-242:2971 |
| 232 | 3 | 63-86:2169 |
| | | 177-194:1878 |
| | | 271-288:2186 |
| 233 | 2 | 116-136:2390 |
| | | 179-194:2530 |
| 235 | 2 | 66-82:2701 |
| | | 110-126:1755 |
| 236 | 2 | 74-106:2580 |
| | | 139-156:1958 |
| 237 | 1 | 522-544:2644 |
| 238 | 2 | 83-97:2024 |
| | | 200-216:2275 |
| 239 | 1 | 200-216:2275 |
| 240 | 1 | 92-109:2588 |
| 241 | 2 | 145-169:1834 |
| | | 317-346:1891 |
| 244 | 4 | 64-83:2948 |
| | | 218-232:2016 |
| | | 452-480:1829 |
| | | 535-553:1999 |
| 245 | 1 | 311-330:2524 |
| 246 | 1 | 78-111:2597 |
| 248 | 1 | 163-180:2270 |

What is claimed is:

1. An isolated polynucleotide comprising a nucleotide sequence selected from the group consisting of SEQ ID NO: 1-124.

2. An isolated polynucleotide encoding a polypeptide with biological activity, wherein said polynucleotide hybridizes to the polynucleotide of claim 1 under stringent hybridization conditions.

3. An isolated polynucleotide encoding a polypeptide with biological activity, wherein said polynucleotide has greater than about 99% sequence identity with the polynucleotide of claim 1.

4. The polynucleotide of claim 1 wherein said polynucleotide is DNA.

5. An isolated polynucleotide of claim 1 wherein said polynucleotide comprises the complementary sequences.

6. A vector comprising the polynucleotide of claim 1.

7. An expression vector comprising the polynucleotide of claim 1.

8. A host cell genetically engineered to comprise the polynucleotide of claim 1.

9. A host cell genetically engineered to comprise the polynucleotide of claim 1 operatively associated with a regulatory sequence that modulates expression of the polynucleotide in the host cell.

10. An isolated polypeptide, wherein the polypeptide is selected from the group consisting of:
(a) a polypeptide encoded by any one of the polynucleotides of claim 1;
(b) a polypeptide encoded by a polynucleotide hybridizing under stringent conditions with any one of SEQ ID NO: 1-124; and
(c) a polypeptide of any one of SEQ ID NO: 125-248.

11. A composition comprising the polypeptide of claim 10 and a carrier.

12. An antibody directed against the polypeptide of claim 10.

13. A method for detecting the polynucleotide of claim 1 in a sample, comprising:
a) contacting the sample with a compound that binds to and forms a complex with the polynucleotide of claim 1 for a period sufficient to form the complex; and
b) detecting the complex, so that if a complex is detected, the polynucleotide of claim 1 is detected.

14. A method for detecting the polynucleotide of claim 1 in a sample, comprising:
a) contacting the sample under stringent hybridization conditions with nucleic acid primers that anneal to the polynucleotide of claim 1 under such conditions;
b) amplifying a product comprising at least a portion of the polynucleotide of claim 1; and
c) detecting said product and thereby the polynucleotide of claim 1 in the sample.

15. The method of claim 14, wherein the polynucleotide is an RNA molecule and the method further comprises reverse transcribing an amlealed RNA molecule into a cDNA polynucleotide.

16. A method for detecting the polypeptide of claim 19 in a sample, comprising:
a) contacting the sample with a compound that binds to and forms a complex with the polypeptide under conditions and for a period sufficient to form the complex; and
b) detecting formation of the complex, so that if a complex formation is detected, the polypeptide of claim 10 is detected.

17. A method for identifying a compound that binds to the polypeptide of claim 10, comprising:
a) contacting the compound with the polypeptide of claim 10 under conditions sufficient to form a polypeptide/compound complex; and
b) detecting the complex, so that if the polypeptide/compound complex is detected, a compound that binds to the polypeptide of claim 10 is identified.

18. A method for identifying a compound that binds to the polypeptide of claim 10, comprising:
a) contacting the compound with the polypeptide of claim 10, in a cell, under conditions sufficient to form a polypeptide/compound complex, wherein the complex drives expression of a reporter gene sequence in the cell; and
b) detecting the complex by detecting reporter gene sequence expression, so that if the polypeptide/compound complex is detected, a compound that binds to the polypeptide of claim 10 is identified.

19. A method of producing the polypeptide of claim 10, comprising,
a) culturing a host cell comprising a polynucleotide sequence selected from the group consisting of any of the polynucleotides from SEQ ID NO: 1-124, under conditions sufficient to express the polypeptide in said cell; and
b) isolating the polypeptide from the cell culture or cells of step (a).

20. Am isolated polypeptide comprising an amino acid sequence selected from the group consisting of any one of the polypeptides SEQ ID NO: 125-248.

21. The polypeptide of claim 20 wherein the polypeptide is provided on a polypeptide array.

22. A collection of polynucleotides, wherein the collection comprising of at least one of SEQ ID NO: 1-124.

23. The collection of claim 22, wherein the collection is provided on a nucleic acid array.

24. The collection of claim 23, wherein the array detects full-matches to any one of the polynucleotides in the collection.

25. The collection of claim 23, wherein the array detects mismatches to any one of the polynucleotides in the collection.

26. The collection of claim 22, wherein the collection is provided in a computer-readable format.

The application's sequence listing, which the Patent Office published only in electronic form, follows.

SEQUENCE LISTING (412 sequences)

SEQ ID NO: 1 - DNA, 860 bp, Homo sapiens
  CDS (318)..(860)
atggcccagtcagctctcagtgaaagcctccatactgttctcaccttcctaagggccccagggtcaagggtcaaaccaatagatgattccatggcagttggcagtcctgacagcaggctggccctgatagataacggaagtgaggaagggtgagagttatctatcttctctgttttatagactacttcagcttctgctgttaccaatgcctcagcaaccactgaaagttcagatatcacccttcttgtaactaatcaaatcaaggaagagatctacaaaatagtggtggtggttccagctagaaattttcactcacaatggtgcatgtttcaaatagaagtatccagggtatgaacatacttttctcctcctgggccgtagtcttaatggtgatgggaatcaccttagataaatgggttgaattgatttcagaagatgaaagagccaagatgaaccacagtccttggatgatgtgttgccctgctctttggccagaagatgacctgaaagtggtcaggattatgatgacgtcgagccttggcctttccttcctccttaacttaatcctgggtatgaaattcacctatctgattcctcaaaataaatatatacaactcttcactaccatcctcagtttcttctcaggagtcctctctctcctagagtgcaagttgtctaccagtagctgtacctgcctgaacatccataaatctgacaacgaatgtaaggaatctgagaattctatcgaagatatttcattaccagaatgcactgcaatgcctcgtagcattgtccgtgcacacactgtgaattccctaaacaaaaaagtccaaacacgtcacgtaacctgggctctgtga

SEQ ID NO: 2 - DNA, 4023 bp, Homo sapiens
  CDS (718)..(4023)
atgcaagggtcctccatcattaacgcctctttaataaaaactcttttcaaggccactttacttccaaaggaagctggagtcattcaatgcaagcaccatcaaaaggcatcagatcccatcattcagggcaatgcttatgctgataagactgtctccctgcaggagctgcagcaggactttgagaatgcgccccccaccgaccccaacaacaaccagaccccggctaacggcaccagcgtgtcctatatcaccttcagccctgacagctcctcacctgcccagagtgagccaccagcctccgctgaggcccccggcgagcccagtgacatgctggccagcgtcccacccttcgtcaccttccacaccctcatcctggacatgagtggagtcagcttcgtggacttgatgggcatcaaggccctggccaagctgagctccacctatgggaagatcggcgtgaaggtcttcttggtgaacatccatgcccaggtgtacaatgacattagccatggaggcgtctttgaggatgggagtctagaatgcaagcacgtctttcccagcatacatgacgcagtcctctttgcccaggcaaatgctagagacgtgaccccaggacacaacttccaaggggctccaggggatgctgagctctccttgtacgactcagaggaggacattcgcagctactgggacttagagcagatgggtctgggcttcatgcagtttggctttgtggccatctacctctccgagtccttcatccggggcttcatgacggccgccggcctgcagatcctgatttcggtgctcaagtacatcttcggactgaccatcccctcctacacaggcccagggtccatcgtctttaccttcattgacatttgcaaaaacctcccccacaccaacatcgcctcgctcatcttcgctctcatcagcggtgccttcctggtgctggtgaaggagctcaatgctcgctacatgcacaagattcgcttccccatccctacagagatgattgtggtggtggtggcaacagctatctccgggggctgtaagatgcccaaaaagtatcacatgcagatcgtgggagaaatccaacgcgggttccccaccccggtgtcgcctgtggtctcacagtggaaggacatgataggcacagccttctccctagccatcgtgagctacgtcatcaacctggctatgggccggaccctggccaacaagcacggctacgacgtggattcgaaccaggagatgatcgctctcggctgcagcaacttctttggctccttctttaaaattcatgtcatttgctgtgcgctttctgtcactctggctgtggatggagctggaggaaaatcccagtctgtgctaggagccctgatcgctgtcaatctcaagaactccctcaagcaactcaccgacccctactacctgtggaggaagagcaagctggactgtcttgtaaatgccccagatatgagccagcccaggccccgctacgtggtagacagagccgcatactcccttaccctcttcgacgatgagtttgagaagaaggaccggacatacccagtgggagagaaacttcgcaatgccttcagatgttcctcagccaagatcaaagctgtggtgtttgggctgctgcctgtgctctcctggctccccaagtacaagattaaagactacatcattcctgacctgctcggtggactcagcgggggatccatccaggtcccacaaggcatggcatttgctctgctggccaaccttcctgcagtcaatggcctctactcctccttcttccccctcctgacctacttcttcctggggggtgttcaccagatggtgccaggtacctttgccgttatcagcatcctggtgggtaacatctgtctgcagctggccccagagtcgaaattccaggtcttcaacaatgccaccaatgagagctatgtggacacagcagccatggaggctgagaggctgcacgtgtcagctacgctagcctgcctcaccgccatcatccagatgggtctgggcttcatgcagtttggctttgtggccatctacctctccgagtccttcatccggggcttcatgacggccgccggcctgcagatcctgatttcggtgctcaagtacatcttcggactgaccatcccctcctacacaggcccagggtccatcgtctttaccttcattgacatttgcaaaaacctcccccacaccaacatcgcctcgctcatcttcgctctcatcagcggtgccttcctggtgctggtgaaggagctcaatgctcgctacatgcacaagattcgcttccccatccctacagagatgattgtggtggtggtggcaacagctatctccgggggctgtaagatgcccaaaaagtatcacatgcagatcgtgggagaaatccaacgcgggttccccaccccggtgtcgcctgtggtctcacagtggaaggacatgataggcacagccttctccctagccatcgtgagctacgtcatcaacctggctatgggccggaccctggccaacaagcacggctacgacgtggattcgaaccaggagatgatcgctctcggctgcagcaacttctttggctccttctttaaaattcatgtcatttgctgtgcgctttctgtcactctggctgtggatggagctggaggaaaatcccaggtggccagcctgtgtgtgtctctggtggtgatgatcaccatgctggtcctggggatctatctgtatcctctccctaagtctgtgctaggagccctgatcgctgtcaatctcaagaactccctcaagcaactcaccgacccctactacctgtggaggaagagcaagctggactgttgcatctgggtagtgagcttcctctcctccttcttcctcagcctgccctatggtgtggcagtgggtgtcgccttctccgtcctggtcgtggtcttccagactcagtttcgaaatggctatgcactggcccaggtcatggacactgacatttatgtgaatcccaagacctataatagggcccaggatatccaggggattaaaatcatcacgtactgctcccctctctactttgccaactcagagatcttcaggcaaaaggtcatcgccaagacaggcatggacccccagaaagtattactagccaagcaaaaatacctcaagaagcaggagaagcggagaatgaggcccacacaacagaggaggtctctattcatgaaaaccaagactgtctccctgcaggagctgcagcaggactttgagaatgcgccccccaccgaccccaacaacaaccagaccccggctaacggcaccagcgtgtcctatatcaccttcagccctgacagctcctcacctgcccagagtgagccaccagcctccgctgaggcccccggcgagcccagtgacatgctggccagcgtcccacccttcgtcaccttccacaccctcatcctggacatgagtggagtcagcttcgtggacttgatgggcatcaaggccctggccaagctgagctccacctatgggaagatcggcgtgaaggtcttcttggtgaacatccatgcccaggtgtacaatgacattagccatggaggcgtctttgaggatgggagtctagaatgcaagcacgtctttcccagcatacatgacgcagtcctctttgcccaggcaaatgctagagacgtgaccccaggacacaacttccaaggggctccaggggatgctgagctctccttgtacgactcagaggaggacattcgcagctactgggacttagagcaggccctggccgcaatggacaagcctcctgctcactccaccccacccacatctgccctgtccttggcagctgaaggacaccttgacttccagcttttacgagtgagccaaaaacagaaggacaagtacaactgtgctggcctgctgtacaagcttcaaaaagtgtcccagagcccgcacggctcggtgtcagatggtgtcaggctgtcacggacatag

SEQ ID NO: 3 - DNA, 1416 bp, Homo sapiens
  CDS (145)..(753)
gggtcttatcacggaggctggggccaggcagcccttcggttcgggtgggcccatggaccccagtccaacgccgagggaataggaccatccaaaagcggaaccttcgcctcagaaaaaggcgtggaccctgccagcagccaggccatggagctctctgatgtcaccctcattgagggtgtgggtaatgaggtgatggtggtggcaggtgtggtggtgctgattctagccttggtcctagcttggctctctacctacgtagcagacagcggtagcaaccagctcctgggcgctattgtccctggcctcatcactgtgcggctcaaattcctcaatgataccgaggagctggctgtggctaggccagaggataccgtgggtgccctgaagagcaaatacttccctggacaagaaagccagatgaaactgatctaccagggccgcctgctacaagacccagcccgcacactgcgttctctgaacattaccgacaactgtgtgattcactgccaccgctcacccccagggtcagctgttccaggcccctcagcctccttggccccctcggccactgagccacccagccttggtgtcaatgtgggcagcctcatggtgcctgtctttgtggtgctgttgggtgtggtctggtacttccgaatcaattaccgccaattcttcacagcacctgccactgtctccctggtgggagtcaccgtcttcttcagcttcctagtatttgggatgtatggacgataaggacataggaagaaaatgaaagggtcctctgaaggagttcaaagctgctggccaagctcagtggggagcctgggctctgagattccctcccacctgtggttctgactcttcccagtgtcctgcatgtctgcccccagcacccagggctgcctgcaagggcagctcagcatggccccagcacaactccgtagggagcctggagtatccttccatttctcagccaaatactcatcttttgagactgaaatcacactggcgggaatgaagattgtgccagccttctcttatgggcacctagccgccttcaccttcttcctctaccccttagcaggaatagggtgtcctcccttctttcaaagcactttgcttgcattttattttatttttttaagagtccttcatagagctcagtcaggaaggggatggggcaccaagccaagcccccagcattgggagcggccaggccacagctgctgctcccgtagtcctcaggctgtaagcaagagacagcactggcccttggccagcgtcctaccctgcccaactccaaggactgggtatggatcgctgggccctaggctcttgcttctggggctattggagggtcagtgtctgtgactgaataaagttccattttgtggtcctgcaaaaaaaaaaaaaaag

SEQ ID NO: 4 - DNA, 1047 bp, Homo sapiens
  CDS (1)..(474)
atggctacggcagccggcgcgacctactttcagcgaggcagtctgttctggttcacagtcatcaccctcagctttggctactacacaaggatggtgaagtcggaggccagcaatgcggctaccgcctatttccgtccagcaagacccttgccctctctggtcacagtcctggggctgggctacttcgcgtgggttgtcttctggcctcagagtatcccttatcagaaccttgggcccctgggccccttcactcagtacttggtggaccaccatcacaccctcctttgcaatgggtattggcttgcctggctgattcatgtgggagagtccttgtatgccatagtattgtgcaagcataaaggcatcacaagtggtcgggctcagctactctggttcctacagactttcttctttgggatagcgtctctcaccatcttgattgcttacaaacggaagcgccaaaaacaaacttgaagttgtctgaaagcttgctctacacttttacattcatcctcacccttttttttgtggggtagaggaggtgcagtaatttactcagtgatctttctactttctagaaactgtccttcaaagctctttaagaccccctcgttagtcagttttttctcttatatgctctggttgagcttgaatagaccagttgttacttaagaaagaaaccagagaaagattttagcctttccaatcctattggccggaggatctccagcgtccttcttcacggtccttggctgtgttgggacccttgggtgtcttggctatgccacttcgtagactggcctttgggagggatccctggctccggcctcctgatgtaaacccttccctcgacgcacatcttcggttccttcaagcctttcccccgtggctcgaataagggccctccctcttgcatcccgctttttgtccgcggtggactatcttacctcttccgtccgacgggatgaagaacccccgtatgtcggttgatatcttaggggcgtggggatgtgcctacgcggactcgcgcgaccttgtgagggttcc

SEQ ID NO: 5 - DNA, 2057 bp, Homo sapiens
  CDS (652)..(1119)
  misc_feature (1)...(2057): n = a,t,c or g
tagagcctgggggagagtggatccatttgaagggggcagagggcttgagtcagtgtgagaatcgggggatgggtgagatatctccctccagcagcagcacttaggccacattaccctctgaggaatccacatttgtcttagatagttacctgtgcagggatcagnccatttattcctattttctctgacagctggatgaaagggactgggagttttcgtcctcttgaataagaactcgacaacagagtgggaactttctgtcttgtgatccattgcctggtgagtcacagctcacaccatggatttaacctgagagcttcaacttctgctttggccctggagttcccatgccctggtgtcttctaccagttcttaggtagggttttgtatccagagagggttcatctttctcccgtgggctgggggaagaggtcaaagtagaactcaggtaccaaatttgaaaggaaacactcagaaaaaacttctgagcgcagagcggaaaacaccctctcagtccccaccaaagagaaaagctttgggttctaaatttccagtttccattaagggactctgggactggacatttctgaaaattaatgacctgtactgagtaatcctcctaacacactgatcatcaaaaaataacctgtaatgagtttaggctttctgtatttgtctgaatgctttcacgggagtgtgttgcactggagcacagaggacactcgatcgtgcggcgcgcaaggcggggggccgccgctgcctccccgcgggatggctggcactgtgctcggagtcggtgcgggcgtgttcatcttagccctgatctgggtggcagtgctgctgctgtgtgtgctgctgtccagagcctccggggcggcgaggttctctgtcatttttttattcttcggtgctgtgatcatcacatcagttctgttgcttttcccgcgagctggtgaattcccagccccagaagtggaagttaagattgtggatgactttttcattggccgctatgtcctgctggctttccttagtgccatcttccttggaggcctcttcttggttttaatccattatgttctggagccgatctatgccaaaccactgcactcctactgaccactcttcaggaaaacgaaaacctgttctctccttcattgtgatgacattgatgagcaggaaggcactattcagagccttgttttgacagccctcatgccttaaggttagaggagtatctgtccatcactaagacaaatctctggagtcctggcttccagaaacaggattgccaaattgtccctgtggggctagattcttaccagcttaagaaggatattgctatcttcttagtacccgtaccttaggatttccaactgttttgaaagggaaatagtaacagtgatctgcttagagtggattttcactcaagtccttagtaagtggattttggggaaaaaagcacatgggcttctggttctttttgataatatataaaattattcattatgaggttgcagttgtttgcaaaggagaggcactcaaatttgaaaggttattttaatgtgataatttggaagacttactcagatgttggtcattgaccactctgtgcatatatttctgcagagctctgtgaaggcaatgagtgtcacttccctctgctctaataaagcaataaataatagctaaagggctgactttcacttcgaactcttggccacggctttttaatcaagttctttaggtttccttgggattagaggaaaggtatggaaatattgttttttgttttttgtcttgccatgtatctgtaggtttttttcttccatgatgtggtgggctgtgtgtgccttatttaattaccatgagtccatttggggtgtcttcacttttcatctttgtagccctttctccaaagctagtgaggaaggtatattctcaacatcagatataactctatacctgtctgatctcccagaccaaactgaaatttgcattaaatggaggggcccctggtcaggttccacttggaagtctgatctgaatcctagagc

SEQ ID NO: 6 - DNA, 3143 bp, Homo sapiens
  CDS (30)..(1532)
gtttccatttaattacgcagctgaaaggcatgagtgtggtgctggtgctacttcctacactgctgcttgttatgctcacgggtgctcagagagcttgcccaaagaactgcagatgtgatggcaaaattgtgtactatatccctgagaacatttctggagggtcacaaggcttatcattaaggttcaacagcattcagaagctcaaatccaatcagtttgccggccttaaccagcttatatggctttatcttgaccataattacattagctcagtggatgaagatgcatttcaagggatccgtagactgaaagaattaattctaagctccaacaaaattacttatctgcacaataaaacatttcacccagttcccaatctccgcaatctggacctctcctacaataagcttcagacattgcaatctgaacaatttaaaggccttcggaaactcatcattttgcacttgagatctaactcactaaagactgtgcccataagagtttttcaagactgtcggaatcttgattttttggatttgggttacaatcgtcttcgaagcttgtcccgaaatgcatttgctggcctcttgaagttaaaggagctccacctggagcacaaccagttttccaagatcaactttgctcattttccacgtctcttcaacctccgctcaatttacttacaatggaacaggattcgctccattagccaaggtttgacatggacttggagttccttacacaacttggatttatcagggaatgacatccaaggaattgagccgggcacatttaaatgcctccccaatttacaaaaattgaatttggattccaacaagctcaccaatatctcacaggaaactgtcaatgcgtggatatcattaatatccatcacattgtctggaaatatgtgggaatgcagtcggagcatttgtcctttattttattggcttaagaatttcaaaggaaataaggaaagcaccatgatatgtgcgggacctaagcacatccagggtgaaaaggttagtgatgcagtggaaacatataatatctgttctgaagtccaggtggtcaacacagaaagatcacacctggtgccccaaactccccagaaacctctgattatccctagacctaccatcttcaaacctgacgtcacccaatccacctttgaaacaccaagcccttccccagggtttcagattcctggcgcagagcaagagtatgagcatgtttcatttcacaaaattattgccgggagtgtggctctctttctctcagtggccatgatcctcttggtgatctatgtgtcttggaaacgctacccagccagcatgaaacaactccagcaacactctcttatgaagaggcggcggaaaaaggccagagagtctgaaagacaaatgaattcccctttacaggagtattatgtggactacaagcctacaaactctgagaccatggatatatcggttaatggatctgggccctgcacatataccatctctggctccagggaatgtgaggtatgaaccatgatcctcctaaaagcatttctactgcggggaaggagaggtaaatgtttgaagccctagaggtgtctctaatcactagaaagattaatgacccttttgcttttgggttttgctcagtgtgaaaggttacttaattaaattacaaccaccaggaaattgactgctttttttttttttaaatggttgaaacttgaaggaagttcattcaaggataagttggaataaagcactatgttaaaacatctgctttttaacaatttgtatacaggggttggacttaaaaacacacatacaaacaaaactcttttcattctgaaatttctgtctggttcttggtgtttgactgttgtaatggagtaaagaagagggccagcttaatttaaaaataaagtgagtttaccaaaattccagaaggtaatgaagatttaaaccaaagagcaattttcccaagggttgattttgttgtaaatttttagttttaatgaaagcatgcaacagggatctcacacccatgttacttgccatttagttattataccagcatagagaatgtcagaggcctactgtgtaattgtatcaggctcctaaggcttctttcttttttttttttgtttccttctttcctactttctttcactccttcctttccttcctttctcttccttctttttttgtttgtttgtttgttttttaattactgggatatagatccgatttcaaaggtttttatgcactggctatttgtgtttaatcagaatgaaacttcaattccatgctttggctttgtccctggtaactaaaatcaggtcacaattttgtggatgatctagcaataataaaatggcagtcataacagggactgtttgtcagtattgctgtcatccccaaaagaaatgatatgtattcttgttaaacttattaaaaaataagtgatacaaatatttataaataaaaggagagaggtttgagttctgggtatcctccctttctgtaacagcctcaaataaaggtgtaccttccatgttatattatttttgtttttataagaataaatttggacccggtttctgattatttaatttaaaagatcacttacaggatcatgttagtgagcagacaaatagtcacaaatttcaaacttgtcaataagtaatgctggatgtaaattgttcttttcttggtaatgttgatcattatgtgcaaagactgactactaaggccttgttgctggaagaaactagtgaagagaggttaaattctggcaatataatgttttagtatctgattttagatgatcactctttcaaaagacagttttaatgagtaattaaagatgttgccctttctaatgctagttaacagttggaaaatataattgctctttgatagcatatactccaatttttccatagtcctaactacaaatgctaatgaaaatgttttctgacaaagcactgaatttgaaataatctctaactcagtacaatttggactattgaactgttcttcaaagaattcattttcttcttttttgtgtatcattgaaaataagagaagtaatcccagataataaattcctaaaaggaaactgtataagcaattgccctt

SEQ ID NO: 7 - DNA, 2753 bp, Homo sapiens
  CDS (417)..(2753)
ggcggggccgccgtcgaggctggcgccagatttcgattggctgtgggtcctgcagcttcagagaaaggaggccttctgtcactcgtcactagctcgctcgctcactgggggaggagcccgcctgaggaatccgtgtgcctgggatgccaagagccagagaatggatcttctccgagtggggacattgctgacaatcccggcttcccgaggcggctaagaacaggcagtttgtgtcggctggctgcagatacccagaggcacaaagagaccgaagccacccggagggacccacggacggacagatggtaggcgcgaacccgagaggaccggcggaggctgagcaccgagagccgccaaggaagagaaactaaccacagccaagttaccccgccggctttccttcgctgcgctaaggaatgaaacccttccagctcgatctgctcttcgtctgcttcttcctcttcagtcaagagctgggcctccagaagagaggatgctgtctggtgctgggctacatggccaaggacaagtttcggagaatgaatgaaggccaagtctattccttcagccagcagccccaggaccaggtggtggtgtcgggacagccagtgacgctactttgcgccatccccgaatacgatggcttcgttctgtggatcaaggacggcttggctctgggtgtgggcagggacctctcaagttacccacagtacctggtggtagggaaccacctgtcaggggagcaccacctgaagatcctgagggcagagctgcaagacgatgcggtgtacgagtgccaggccatccaggccgccatccgctcccgccccgcacgcctcacagtcctggtgccgcctgatgaccccgtcatcctggggggccctgtgatcagcctgcgtgcgggggaccctctcaacctcacctgccacgcagacaatgccaagcctgcagcctccatcatctggttgcgaaagggagaggtcatcaatggggccacctactccaagaccctgcttcgggacggcaagcgggagagcatcgtcagcaccctcttcatctcccctggtgacgtggagaatggccagagcatcgtgtgtcgtgccaccaacaaagccatccccggaggaaaggagacgtcggtcaccattgacatccagcaccctccactggtcaacctctcggtggagccacagccagtgctggaggacaacgtcgtcactttccactgctctgcaaaggccaacccagctgtcacccagtacaggtgggccaagcggggccagatcatcaaggaggcatctggagaggtgtacaggaccacagtggactacacgtacttctcagagcccgtctcctgtgaggtgaccaacgccctgggcagcaccaacctcagccgcacggttgacgtctactttgggccccggatgaccacagaaccccaatccttgctcgtggatctgggctctgatgccatcttcagctgcgcctggaccggcaacccatccctgaccatcgtctggatgaagcggggctccggagtggtcctgagcaatgagaagaccctgaccctcaaatccgtgcgccaggaggacgcgggcaagtacgtgtgccgggctgtggtgccccgtgtgggagccggggagagagaggtgaccctgaccgtcaatggaccccccatcatctccagcacccagacccagcacgccctccacggcgagaagggccagatcaagtgcttcatccggagcacgccgccgccggaccgcatcgcctggtcctggaaggagaacgttctggagtcgggcacatcggggcgctatacggtggagaccatcagcaccgaggagggcgtcatctccaccctgaccatcagcaacatcgtgcgggccgacttccagaccatctacaactgcacggcctggaacagcttcggctccgacactgagatcatccggctcaaggagcaaggttcggaaatgaagtcgggagccgggctggaagcagagtctgtgccgatggccgtcatcattggggtggccgtaggagctggtgtggccttcctcgtccttatggcaaccatcgtggcgttctgctgtgcccgttcccagagaaatctcaaaggtgttgtgtcagccaaaaatgatatccgagtggaaattgtccacaaggaaccagcctctggtcgggagggtgaggagcactccaccatcaagcagctgatgatggaccggggtgaattccagcaagactcagtcctgaaacagctggaggtcctcaaagaagaggagaaagagtttcagaacctgaaggaccccaccaatggctactacagcgtcaacaccttcaaagagcaccactcaaccccgaccatctccctctccagctgccagcccgacctgcgtcctgcgggcaagcagcgtgtgcccacaggcatgtccttcaccaacatctacagcaccctgagcggccagggccgcctctacgactacgggcagcggtttgtgctgggcatgggcagctcgtccatcgagctttgtgagcgggagttccagagaggctccctcagcgacagcagctccttcctggacacgcagtgtgacagcagcgtcagcagcagcggcaagcaggatggctatgtgcagttcgacaaggccagcaaggcttctgcttcctcctcccaccactcccagtcctcgtcccagaactctgaccccagtcgacccctgcagcggcggatgcagactcacgtctaa

SEQ ID NO: 8 - DNA, 573 bp, Homo sapiens
  CDS (1)..(573)
atggtgctgtgggtcagagctggggcatggcccagggattcagtgtgccttgactccccctgtaaatgttcctctcagaagccttcttggccttccagcccttggtttttgagacaaccagcagtcatttgttcgttcctgacattccttcctgtcccttccttccaggttctgtggacaatcacaatgggaatccaaggagggtctgtcctgttcgggctgctgctcgtcctggctgtcttctgccattcaggtcatagcctgcagtgctacaactgtcctaacccaactgctgactgcaaaacagccgtcaattgttcatctgattttgatgcgtgtctcattaccaaagctgggttacaagtgtataacaagtgttggaagtttgagcattgcaatttcaacgacgtcacaacccgcttgagggaaaatgagctaacgtactactgctgcaagaaggacctgtgtaactttaacgaacagcttgaaaatggtgggacatccttatcagagaaaacagttcttctgctggtgactccatttctggcagcagcctggagccttcatccctaa

SEQ ID NO: 9 - DNA, 2245 bp, Homo sapiens
  CDS (464)..(2020)
atggccctgaccgtggcatctcacaccttgggaaagggcacgatagcggttggcgagaggccacatttccgccacgtgacccgcgcatgcgcctgcttgctggagagcgagcgtcttttgccacgaacacctgcggcgtgccgaagttcctcttctctgccccggttccgggcggtccgctgggaggtggcgcccggagggacacccgtgcctggggtcggggccagtgctcttctcggagctccagaagttctgctgagaagcgcggcggcagcaagacgacttctccggagccgccgagctggagttagaggtggagctccgtggggccgggcccccggctgcggggcagcggctcctgcaggcggaggccccggcggagaatgagccggagccggaggtggtggtggtctcctggcagagcggtgggaccgggagcaagctgcggtggttcaccaccttgatgctgtgtgcctccttcctggggctgggattgagtgttgctatagtgggacccacgtttcaagatttggcaacaaacgtgaaccgaaatatcagtagtctgtctttcatttttgtgggtcgtgccttgggatatttgagtggctctgtgattggtggatttcttgtcgatgtcatgaattattttttacttttgggaatctcaatgtcggctaccaccgttggtctttatcttgttcctttttgcaagacagcaatattactcactgtcatgatgtctatcttcggtgtttcaattggcattctggatacaggtggtaacgtccttatcttggctatttggggggacaaaggagccccacatatgcaggccttacacttctcttttgccttgggtgcctttttggctccactgctagctaaactggctttgggtccgacagcgtctgctgaaaaccacacagagtctgacttccatcctgcactcaaccaatcatctgatgctgactcagaagctctgtttggagtacctaatgataagaatttactgtgggcttatgctgttatcggtacttacatgttcttagtttctgtcatttttttttgtctgtttttaaagaatagctcaaagcaagaaaaagcaagagcatctgctgagacatttcgaagagcaaaatatcacaacgcccttctttgtctcctttttctgttcttctttttttatgttggagctgaggtaacatatggctcttatgttttctcatttgcaaccacccatgctggcatgaaagaaagtgaagctgctgggttgaactccatcttctgggggacatttgcagcctgcaggggcctggcaatcttttttgctacctgtttacagcctggaaccatgattgtgttgagcaacattggcagcctgacttcatctttatttctggtgctttttgacaagaacccaatttgtctctggatagcaacttcagtgtatggggcttcaatggcaaccacatttccgagtggtgtttcttggattgagcagtacacgaccatccatgggaaatctgcagcattttttgtaattggtgcttccctgggagaaatggctattcctgcagtcattggaattcttcaaggaaaataccctgatttgcctgtagttctgtatacctctttgggagcatcaatagctactggtattttatttcctgtgctatataaattagccacttcacctcttgatcgccagcgaaaagaagacagaaagagtgaggaccagaaagctctgctctctagctccgggctaaatgaatatgaggaagagaatgaagaggaggatgcagaaaaatggaatgaaatggattttgaaatgattgaaacgaatgatacaatgaggcattctataatagagacatctagaagtagtctgacggagcccacagctgaagtctataatcaatacccatcaaatgcactggtgtttgagtcttctccttttaatactggcagtgcccatgtgaagcacttgccagaaaccaggacaaaagggactaacgtttagagaagatggattactcactgacatctttgaataactgccacttctaaggacgccattcagagcagagcattagcagaatttcaccatgctttggggattaaaatttttaggtccatattatagcaaatgctaaaaatttttgaaatgttctgtaattcccagagtcttccataaataaccaaatggtctcatacaaaaaaaaaaaaaaaaaaaaaaaaaatggtt

SEQ ID NO: 10 - DNA, 2148 bp, Homo sapiens
  CDS (1)..(2148)
atggactggatcagtttctcaacaatggcctcactgagcgggtcctgttgggtcaggtgtctggggctatgtgacaggggctcacaatggagtccagggatgtcagggatgtccaagtctgtgcttagaactcatcctggcccgcagagcctgccgcgagtccctggcgtcccctgtggcgggctcttggagccactttcccgagcggaagtcagcccgcggctcggactccggcgggacctgctcggaggaatggcgccgccgggttcaagcactgtcttcctgttggccctgacaatcatagccagcacctgggctctgacgcccactcactacctcaccaagcatgacgtggagagactaaaagcctcgctggatcgccctttcacaaatttggaatctgccttctactccatcgtgggactcagcagccttggtgctcaggtgccagatgcaaagaaagcatgtacctacatcagatctaaccttgatcccagcaatgtggattccctcttctacgctgcccaggccagccaggccctctcaggatgtgagatctctatttcaaatgagaccaaagatctgcttctggcagctgtcagtgaggactcatctgttacccagatctaccatgcagttgcagctctaagtggctttggccttcccttggcatcccaagaagcactcagtgcccttactgctcgtctcagcaaggaggagactgtgctggcaacagtccaggctctgcagacagcatcccacctgtcccagcaggctgacctgaggagcatcgtggaggagattgaggaccttgttgctcgcctggatgaactcgggggcgtgtatctccagtttgaagaaggactggaaacaacagcgttatttgtggctgccacctacaagctcatggatcatgtggggactgagccatccattaaggaggatcaggtcatccagctgatgaacgcgatcttcagcaagaagaactttgagtccctctccgaagccttcagcgtggcctctgcagctgctgtgctctcgcataatcgctaccacgtgccagttgtggttgtgcctgagggctctgcttccgacactcatgaacaggctatcttgcggttgcaagtcaccaatgttctgtctcagcctctgactcaggccactgttaaactagaacatgctaaatctgttgcttccagagccactgtcctccagaagacatccttcacccctgtaggggatgtttttgaactaaatttcatgaacgtcaaattttccagtggttattatgacttccttgtcgaagttgaaggtgacaaccggtatattgcaaataccgtagagctcagagtcaagatctccactgaagttggcatcacaaatgttgatctttccaccgtggataaggatcagagcattgcacccaaaactacccgggtgacatacccagccaaagccaagggcacattcatcgcagacagccaccagaacttcgccttgttcttccagctggtagatgtgaacactggtgctgaactcactcctcaccagacatttgtccgactccataaccagaagactggccaggaagtggtgtttgttgccgagccagacaacaagaacgtgtacaagtttgaactggatacctctgaaagaaagattgaatttgactctgcctctggcacctacactctctacttaatcattggagatgccactttgaagaacccaatcctctggaatgtggctgatgtggtcatcaagttccctgaggaagaagctccctcgactgtcttgtcccagaaccttttcactccaaaacaggaaattcagcacctgttccgcgagcctgagaagaggccccccaccgtggtgtccaatacattcactgccctgatcctctcgccgttgcttctgctcttcgctctgtggatccggattggtgccaatgtctccaacttcacttttgctcctagcacgattatatttcacctgggacatgctgctatgctgggactcatgtatgtctactggactcagctcaacatgttccagaccttgaagtacctggccatcttgggcagtgtgacgtttctggctggcaatcggatgctggcccagcaggcagtcaagagaacagcacattag

SEQ ID NO: 11 - DNA, 556 bp, Homo sapiens
  CDS (28)..(555)
gcctgcaggattcggcacgagggccggatggggaaggcggcggcggcggtggcctttggggccgaagtgggcgtgcggctcgcgctgttcgcggccttcctggtgacggagctgctccccccgttccagagactcatccagccggaggagatgtggctctaccggaacccctacgtggaggcggagtatttccccaccaagccgatgtttgttattgcatttctctctccactgtctctgatcttcctggccaaatttctcaagaaggcagacacaagagacagcagacaagcctgcctggctgccagccttgccctggctctgaatggcgtctttaccaacacaataaaactgatcgtagggaggccacgcccagatttcttctaccgctgcttccctgatgggctagcccattctgacttgatgtgtacaggggataaggacgtggtgaatgagggccgaaagagcttccccagtggacattcttcctgtatgaatatccatatgggctctaccctatgctttggtttcacttcagtgagtttggccttgtaag

SEQ ID NO: 12 - DNA, 1642 bp, Homo sapiens
  CDS (24)..(1121)
gagattctccccagacgccgaggatggccgtcatggcgccccgaaccctcctcctgctgctctcgggggccctggccctgaccgagacctgggcgggctcccactccatgaggtatttctacacatccgtgtcccggcccggccgcggggagccccgcttcatcgcagtgggctacgtggacgacacgcagttcgtgcggttcgacagcgacgccgcgagccagaggatggagccgcgggcgccgtggatagagcaggaggggccggagtattgggaccaggagacacggaatgtgaaggcccactcacagactgaccgagtggacctggggaccctgcgcggctactacaaccagagcgaggccggttctcacaccatccagaggatgtatggctgcgacgtggggtcggacgggcgcttcctccgcgggtaccaccagtacgcctacgacggcaaggattacatcgccctgaacgaggacctgcgctcttggaccgcggcggacatggcggctcagatcaccaagcgcaagtgggaggcggcccatgtggcggagcagctgagagcctacctggagggcacgtgcgtggagtggctccgcagatacctggagaacgggaaggagacgctgcagcgcacggacccccccaagacacatatgacccaccaccccatctccaactatgaggccacgctgaggtgctgggccctgggcttctaccctctggagatcacactgacccaggagcgggatggggaggaccaaattcaggatgcagagtttgtggagaccagacttgcagggtacagaaccttccagaagtgggcagctgcagtggtgtcttctggagagaagcagaggtacacatgccatgtgcagcatgaggggttgcctgagcccctcacactaagatgggagctgtcttcccagcccaccatccccatcgtgggcatcattgctggcctggttctctttggagctgtgatcactggagctgtggtcgctgctgtgatgtggaggaggaagagctcagatagaaaaggagggagctactctcaggctgcaagcagtgacagtgcccagggctctgatgtgtctctcacagcttgtaaagtgtgagacagctgccttgtgtgggactgagaggcaagagttgttcctgcccttccctttgtgacttgaagaaccctgactttgtttctgcaaaggcacctgcatgtgtctgtgttcatgtaggcataatgtgaggaggtggggagaccaccccacccccatgtccaccatgaccctcttcccacgctgacctgtgctccctccccaatcatctttcctgttgcagagaggtggggctgaggtgtctccatctctgtctcaacttcatggtgcactgagctgtaacttcttccttccctattaaaattagaacctgagtataaatttactttctcaaattcttgccatgagaggttgatgagttaattaaaggagaagattcctaaaatttgagagacaaaataaatggaacacatgagaaaaaaaaaaaaatggggcgcccttttaaacggaacctttaagggacctattcttacctgtgactggaaggcatatgtcctctcttatagacattctaaatagaacca

SEQ ID NO: 13 - DNA, 1570 bp, Homo sapiens
  CDS (929)..(1363)
ggaaaagtcagcctctcctgcatgagtgggagctgcaaccttttagaattgataatcacaaacccctcagacccaaagtggaataaagaaaaatatgtaacattaggcattgatggaaaaggactagatcctagtgtaagcatcctaataaaaggagaggttcaaaaacgttctccagaaccagtatttcagactttctatgatgaactaaatgtgccagtacctgagattccaggaaaaactaaaaatttgtttttgcaattagccaaacatgtagcccagtctctacaagtcgcctatgtcatgtttgtggaggaaccgtaacaggagatcaatggccatgggaagcccgagaattggttcctatagacccggttcctgatgaattcccagcccaaaagaaccaccctgacaaattttgggttctgaaagtcttattattggacagtattgcatagctagagaaggaaaaggatttactcatcctgtagggcagcttagttgtcttgggcaaaagctgtataatggtaccacaaaaacagttacatggtggagttccaattacacagaaaaaaatccattcagtaaatttccaaagttgcagactgtttgggcccacccagaattgcactgggactggacggcccccactgggttatactgggtatgtggacacagagcttatgctaagctgcctgatcagtggacaggtagctgtgtaattggcaccattaagccatctttcttcttagtgcccataaaaacaggtaaacttctgggcttcccagtctgtgcttcctgtgaaaaatgaagcatagccataggtgattggaaagacgatgaatggccccctgaaaaaatcttacaatactatggacctgccacttggtcacaagatgtctcatggggatatggaacccccatctacatgctcaaccgaatcatatggttacaagctgttttagaaattattactaataaaaccactcaagccttgactgttcttgcctggcaagagactatgatgagaaatgctatctatcaaaatagactagctcttgattacttgctagcagctgaaggaggagtttgtgaaaaatttgaccttactaattattgtctacacatagatgatcaggggcaagtagttgaggatatagttaaagatataacaaaactggcacatgcacctgtgcaagtgtggcacggactcaatctgggagccatgtttggaaattggttcccagcaataggtggatttaaaactcttataataagagtaataatagtaataggaacctgcttactgctcccttgtctgatacctgtatttctccaaatgataaaaaacttcgtcgcttaaccttagttcaccaaaatgcttcagcacaagcatactatataaatcactatcaatctattgcacgaaaatacataagtagcaaaaataagagtgagaactcccactgataaaaagtgagagtctcaaagaggggaaatgagggaagagagagaccctctcatattgttttatattgttttatactcagtacctcttttaagaaaaatg

SEQ ID NO: 14 - DNA, 892 bp, Homo sapiens
  CDS (6)..(884)
ggaacatggagcgggggccggtggtgggggcaggactgggggccggggcccgaatccaggcactgctgggctgcctgctcaaggtgctgctctgggtggcctctgccttgctgtactttggaagcgaacaggccgcccgccttctgggcagcccctgcttacggcgcctctaccatgcctggctggcagcagtggtcatctttgggccgcttctgcagttccatgtcaaccctcggactatcttcgccagccacggcaacttcttcaacataaaatttgtgaattcagcctggggctggacatgcactttcttagggggctttgtgttgctggtggtgttcctggctacacggcgcgtggcagtaactgccagacacctgagccgactggtagtaggggcagccgtgtggcggggagccggccgggccttcctgctcatcgaggacctgactggctcctgcttcgagccactgccccagggtctgctgctccacgagctgcctgaccgccgcagctgcctggcagccggccaccagtggcgaggctacaccgtctcctcccacaccttcctgctcaccttttgctgcctgctcatggcagaggaagcagctgtgttcgccaagtacctggcccatgggcttcctgccggcgccccactgcgccttgtcttcctgctgaacgtgctgctgctgggcctctggaacttcttgctgctctgtaccgtcatctatttccaccagtacactcacaaggtggtgggcgccgcagtgggcacctttgcctggtacctcacctatggcagctggtatcatcagccctggtctccagggagcccaggccatgggctcttcccccgtccccactccagccgcaagcataactgaaagaaata

SEQ ID NO: 15 - DNA, 1500 bp, Homo sapiens
  CDS (664)..(1413)
agaccccaggcccggacctgcctcgtagttatattaaaagtctagggattaaccagcttgtgcccgtcaattggcttcaattaatcggcaactatactaggaggctttagatcagttccacacccagggtctcgggaattccacagtgagaaccaaaagtgctcaggagttaagagaaccagacgtccgaaattatctccatgcattaccaaaaccccgtggccaccaccggcacggggaaaacttaccaggtacaatgagccagtgactgttactgaatttcttaagattacacttttcccaactactgcagactgcttcagaatagaagaaggaggcgctgttctacaggatggagagtggggagcttggaggagagagcacgaccccctgctgctgccgcaggatgttgcccttgattctaggcagagacaggaggcatcagacagctgtgacagccatggagcttccctaccacttctgagccagagggaagactttggagaagcagaagcccaaagacactgctgggagattggtctgtgctctgggagaaccctaggttgtgtttcccgtgtacaagccaccgatcttgtggaagtcggctactttcagtggcagaagaggccacatctgcttcctgtaggccctctgggcagaagcatgcgctggtgtctcctcctgatctgggcccaggggctgaggcaggctcccctcgcctcaggaatgatgacaggcacaatagaaacaacggggaacatttctgcagagaaaggtggctctatcatcttacaatgtcacctctcctccaccacggcacaagtgacccaggtcaactgggagcagcaggaccagcttctggccatttgtaatgctgacttggggtggcacatctccccatccttcaaggatcgagtggccccaggtcccggcctgggcctcaccctccagtcgctgaccgtgaacgatacaggggagtacttctgcatctatcacacctaccctgatgggacgtacactgggagaatcttcctggaggtcctagaaagctcaggtattcctgctggagcaatggctgagcacggtgccaggttccagattccattgcttggagccatggccgcgacgctggtggtcatctgcacagcagtcatcgtggtggtcgcgttgactagaaagaaagccctcagaatccattctgtggaaggtgacctcaggagaaaatcagctggacaggaggaatggagccccagtgctccctcacccccaggaagctgtgtccaggcagaagctgcacctgctgggctctgtggagagcagcggggagaggactgtgccgagctgcatgactacttcaatgtcctgagttacagaagcctgggtaactgcagcttcttcacagagactggttagcaaccagaggcatcttctggaagatacacttttgtctttgcaattatagatgaatatataagcagctgtactctccatcagtgctgc

SEQ ID NO: 16 - DNA, 741 bp, Homo sapiens
  CDS (1)..(741)
atggcccggctgggcgcgctgctcctggccgccgccctgggtgcactgctcagcttcgcgctcctggccgccgcggtcgccagcgactactggtacatcctggaggtggcggacgccggcaatggcagcgcctggcccgggcgcgcagagctgctctcctcgcactcggggctctggcgcatctgcgggcagaacggctgcatcccgctggtcgacccttttgccagtgagagcctggacgtctccacctcggtgcagcacctcatcttgctgcaccgtgcagtcattgtggtcctgcccctgagcctggtccttctcgtgtgtggctggatctgcggcctgctcagctccctggcccagagcgtgtctctgctgcttttcaccggctgctacttcctgctggggagtgtcctgacactggcgggggtcagcatctacatcagctactcgcacctggcctttgcggagacggtgcagcagtatggcccgcagcacatgcagggcgtccgcgtcagcttcggctggtccatggccctggcctggggctcctgtgccttggaggcattcagcggaaccctcctgctctcagctgcctggaccctcagcctgagccccccaatctgtggtcatctgagtccccagcaggtgggagggagaccttggatgttgaaagtgaatacagtgcactgtcctcacaacggggaaaaggaggagaacggtatgcgggatcccctgtactag

SEQ ID NO: 17 - DNA, 267 bp, Homo sapiens
  CDS (1)..(267)
atgaaagcccttatgctgctcaccctgtctgttctgctctgctgggtctcaggtaagatgtgggttttctccaatctgcgctgtggcacaccagaagagccctgtcaggaggccttcaaccaaaccaaccgcaagctgggtctgacatataacaccacctgctgcaacaaggacaactgcaacagcgcaggaccccggcccactccagccctgggccttgtcttccttacctccttggctggccttggcctctggctgctgcactga

SEQ ID NO: 18 - DNA, 919 bp, Homo sapiens
  CDS (1)..(828)
atggcgcctcctccgccttcgccccaactgcttctcctggcagccctcgcgaggctcctgggtcccagcgaggctgaggatgtcaccttcctctaccacccctgtgcccatccctggctgaagctccagcttgccctcctggcctatgcttgtatggctaacccttccctcacccctgacttcagcctcacgcaggatcgggccctggctctggcctttgctctgcggagctggcggccccctggcacagaggtgacatctcaagggcccaggcagccctcttctagtggtgccaagaggcggaggctgcgggctgcccttggtccccagcctactcgctcagccctgaggtttccctctgcttccccagggagcttgaaggccaagcagtccatggcgggaatccctggtagggagagtaatgccccatctgtgcccactgtctccctgctgccgggggcgcctggaggcaatgccagctccaggacagaggctcaggtgcccaacgggcaaggcagcccagggggctgtgtctgttcaagtcaggcttccccggcccctcgcgcagcagcgcctccacgggcagcccggggccccaccccacgcactgaagaggccgcctgggctgccatggccctgaccttcctgctggtgctgctcaccctggccacgctctgcacacggctgcacagaaacttccgacgcggggagagcatctactgggggccgcgacctctgccacgtggaccgcgcgcggggcgctccctggtggcgatggcgcggcactggccgagcactgcgggggctttcctccttgttggttgctgagtgggcggccaaggggagaaaaggagccgcttctgcctcccttgccaaaactccgtttctaattaaattatttttagtagaaaaaaaaaaa

SEQ ID NO: 19 - DNA, 2481 bp, Homo sapiens
  CDS (1)..(2481)
atggcccgggccagggccggggcgctgctggcgctttgggtgctcggggccgccgcgcatccgcagtgcctggacttcaggccgcccttccggccgacgcagccgctgcgcctctgcgcgcagtactcggacttcggctgctgcgatgaggggcgcgacgccgagctgacccgccgcttctgggccctggcgagccgcgtggacgccgccgagtgggccgcgtgcgccggctacgcgagggacctgctgtgccagtccgtggagtggacagacatgcaaagagataatgaagtcctagccaagctgactggctggagcgcccctggcgacggagcagtgactgctgtagagaactcaccctctctggactaccctggtctgggcaccacatttacgtcgtgtgaatgctcgccgtatgcagcccacctctatgacgccgaggacccattcacgcccctgcgcacggtgcccgggctctgccaggattactgcctggacatgtggcataagtgccgggggctgttccgtcacctgtcaactgaccaggagctctgggcgctggagggcaaccttgccaggttctgccgctacctgtccctggatgacacggactactgcttcccttacctgctggtcaacaagaacctcaactcaaacctgggccacgtggtagccgatgccaagggctgcctgcagctgtgcctggaggaggtggccaacgggctgcgcaaccccgtggccatggtccatgccagggatggcacccaccgcttcttcgtggccgagcaggtggggctggtgtgggcctacctgcccgaccgctcgaggctggggaagcctttcctgaacatcagccgggtggtgctcacctcgccctgggagggtgacgagcgtggcttcctgggcattgccttccaccccagcttccagcacaaccgcaggctctacgtctactactcagtgggtatccgcagcagtgagtggatccgcatcagcgagttcagagtctccgaggatgacgagaacgccgtggaccacagctctgagaggataatcctggaggtcaaagaaccagcctcaaaccacaacgggggccagctgcttttcggggatgacgggtacctctacatcttcactggagatggcgggatggccggagacccctttgggacatttggaaatgcccaaaacaagtatgttcagcttttgattggcttgtgggttggtctccatatccctgggcttctcatactcttccagaggtcggcgctgctgggcaaggtgctgcgcatcgacgtggaccgtaagggagcgcggcctgccctacggcatcccgcccgacaacccgttcgtgggcgaccccgcggcgcagccgaggtctacgccctaggcgtgcgcaacatgtggcgctgctccttcgaccgtggcgacccctcctcgggcactggccgcgggcgcctcttctgcggcgacgtgggccagaacaagttcgaggaggtggacgtggtggagcgcggcggcaactatggctggcgcgcgcgcgaagggttcgagtgctacgaccgcagcctgtgcgccaacacctctctcaatgacttgctgccgattttcgcctacccgcacacggttggcaagtcggtcacagggggctacgtgtaccggggctgcgagtaccccaacctgaacggcctctacatttttggggatttcatgagcgggcgtctgatgtccctccaagagaacccagggacaggccagtggcagtacagtgagatctgcatgggccacggccagacctgtgagttcccaggcctcatcaacaactactacccgtacatcatctccttcggggaggacgaggccggggagctgtacttcatgtcgacaggggagccgagtgccacagctccacgcggagttgtctacaaaataattgacgcatccagagttcatcccgaagacacggagcaccccgcggcctacagcgcgggcgcccacgcgggcgcccgccgagggcgccccacggccgctccccccgcgccaaccccgcggccagcgcggcccacccagcagccagggagccggaggggcggcgggcggcggcgggggcggctgaactcggcgagccgggcgttccgggatggcgaggtgcgcctggtgcggcccgcgggcctgagctctggcagcgggcgcgtggaggtgttcgtgggcggacgctggggcaccgtgtgcgacgactcctggaacatcagcggcgccgccgtcgtgtgtcgccagctggggtttgcctacgccgtgcgcgccgtcaagagagccgagttcggccagggcggctcgctgcccattctgctggacgatgtgcgctgcgcgggctgggagcggaacctgctggagtgccagcacaacggcgtgggcacccacaactgcgagcacgacgaggatgcgggcgtcgtgtgcagccaccagaaccccgacctgtag

SEQ ID NO: 20 - DNA, 1269 bp, Homo sapiens
  CDS (1)..(1269)
atggcgggctgctgcgccgcgctggcggccttcctgttcgagtacgacacgccgcgcatcgtgctcatccgcagccgcaaagtggggctcatgaaccgcgccgtgcaactgctcatcctggcctacgtcatcgggtgggtgtttgtgtgggaaaagggctaccaggaaactgactccgtggtcagctccgttacgaccaaggtcaagggcgtggctgtgaccaacacttctaaacttggattccggatctgggatgtggcggattatgtgataccagctcaggaggaaaactccctcttcgtcatgaccaacgtgatcctcaccatgaaccagacacagggcctgtgccccgagattccagatgcgaccactgtgtgtaaatcagatgccagctgtactgccggctctgccggcacccacagcaacggagtctcaacaggcaggtgcgtagctttcaacgggtctgtcaagacgtgtgaggtggcggcctggtgcccggtggaggatgacacacacgtgccacaacctgcttttttaaaggctgcagaaaacttcactcttttggttaagaacaacatctggtatcccaaatttaatttcagcaagaggaatatccttcccaacatcaccactacttacctcaagtcgtgcatttatgatgctaaaacagatcccttctgccccatattccgtcttggcaaaatagtggagaacgcaggacacagtttccaggacatggccgtggagggaggcatcatgggcatccaggtcaactgggactgcaacctggacagagccgcctccctctgcttgcccaggtactccttccgccgcctcgatacacgggacgttgagcacaacgtatctcctggctacaatttcaggtttgccaagtactacagagacctggctggcaacgagcagcgcacgctcatcaaggcctatggcatccgcttcgacatcattgtgtttgggaaggcagggaaatttgacatcatccccactatgatcaacatcggctctggcctggcactgctaggcatggcgaccgtgctgtgtgacatcatagtcctctactgcatgaagaaaagactctactatcgggagaagaaatataaatatgtggaagattacgagcaggtaggcccctcctggcccccagcaggcacaggcctctcatctcttgggtgtgggagccctgggcgtgggcctgtctggggaggcccttctgcagaggctggcaccagtgtggcgtggtgtccccgttaa

SEQ ID NO: 21 - DNA, 1142 bp, Homo sapiens
  CDS (272)..(1114)
gaattcccgggtcgactattctgtcgagaacattcttacgaggcagtgattaccatgattacccggcgctgtcacacgactcaatatcagaaggtgagccctattcacacctcggccaggctgcggtggccaggactggtttgggaaggcagggccccggtgtgcagccacagccagcagcctcctacctacacaagggtgttcgggagcatctcagggccgaagactttgctgcctgccctgccaggactttgtcctcacccctggcaccatgcagctccaggtgttctggactgggctggaatacacctgccggctcctgggcatcaccactgctgcagtgttgatcggcgtgggcactgagaccttcctccagggccagttcaaaagcctggctttctatctgctcatggcccagtccggaacacgccatgtcctggagacagcccgtggtgaatgttgtctgggggaatccaggtttacaggagccgctgtctccatatgtgaaggggcctactttgtggctcagctgctggccatctgcttccagtgtcaaccagggtccctggcagacagagtaagggagaaagcccactggctgggctgcttccagaagttcctggcctacctgctgctgtcggtggcctgcttcctccacccggtcctggtctggcacgtgaccatcccaggctccatgctcatcatcaccggcctggcctacttccttctgagcaagcggaagaagaggaaagctgcccccgaggtgctggcctccccagagcagtacacagacccctctagcagcgctgtgagcaccaccggctctggggacacagagcaaacctacactttccatggggccctcaaggaggggcccagctcccttttcatccacatgaagagtatcctgaaggggactaagaagcccagtgccctccagccccccaacaccctgatggagctgagcctggagccagccgactccctggccaagaagaagcaggtgcactttgaagacaacttggtccgcatagtcccctccctcgccgaaggtctggatgatggggacaccccactcttcctgtcatctcttacagccaccggcctgttctgagcgcttgctccagcctggaggacgctca

SEQ ID NO: 22 - DNA, 1884 bp, Homo sapiens
  CDS (1)..(1884)
atggcaggaggctcagccacgacctggggttaccctgtggccctgctactgctggtcgccaccctggggctgggcctccggcacagctacgactgtgggatcaagggaatgcagctgctggtgttccccaggccaggccagactctccgcttcaaggtggtggatgaatttgggaaccgatttgatgtcaacaactgctccatctgctaccactgggtcacctccaggccgcaggagcctgcagtcttctcggccgattacagaggctgccacgtgctggagaaggatgggcgtttccacctgagggtgttcatggaggctgtgctgcccaatggtcgtgtggatgtggcacaagacgctactctgatctgtcccaaacctgacccctcccggactctggactcccagctggcaccacccgccatgttctctgtctcaaccccacaaaccctttccttcctccccacctctggccatacctcccaaggctctggccatgcctttcccagcccactggacccagggcacagctctgtccacccaacccctgctttaccatcccctggacctggacctaccctcgccaccctggctcaaccccactggggcaccttggaacactgggatgtgaacaaacgagattacataggtacccacctgagccaggagcagtgccaggtggcctcagggcacctcccctgcatcgtgagaagaacttcaaaagaagcctgtcagcaggctggctgctgctatgacaacaccagagaggttccctgttactatggcaacacagctactgtccagtgcttcagagatggctacttcgtcctcgtagtgtcccaagaaatggccttgacacacaggatcacactggccaacatccacctggcctatgcccccaccagctgctccccaacacagcacacggaagctttcgtggtcttctacttccctctcacccactgtggaaccacaatgcaggtggctggcgaccagctcatctatgagaactggctggtgtctggcatccacatccaaaaggggccacagggttccatcacgcgggacagcaccttccagcttcatgtgcgctgtgtcttcaacgccagtgacttcctgcccattcaggcatccattttcccacccccatcgcctgctcctatgacccagcccggccccctgcggcttgagctgcggattgccaaagacgagaccttcagctcgtactatggggaggatgactatcccatcgtgaggctgctccgagaaccagtccatgtggaggtccggcttctgcagaggacagaccccaacctggtcctgctgctgcaccagtgctggggcgctcccagtgccaaccccttccagcagccccagtggcccatcctgtcagacggatgccctttcaagggcgacagctacagaacccaaatggtagccttggacggggccacacctttccagtcgcactaccagcgattcactgttgctaccttcgccctcctggactcaggctcccagagagccctcagaggactggtttacttgttctgcagcacctctgcctgccacacctcagggctggagacttgctccactgcatgtagcactggcactacaagacagcgacgatcctcaggtcaccgtaatgacactgccaggccccaggacatcgtgagctctccggggccagtgggctttgaggattcttatgggcaggagcccacacttgggcccacagactccaatgggaactccagcctgagacctctcctttgggcggtccttttgctgccagctgttgccctggtccttgggtttggtgtctttgtgggcctgagccagacctgggcccagaagctctgggaaagcaacagacagtga

SEQ ID NO: 23 - DNA, 1948 bp, Homo sapiens
  CDS (367)..(1683)
ggcagctgttttgggctgaggtgtccctagctggctctgcggctcttccgggtctgggctcggagattcacaggcggcccgcgaggccgagcgagggacgcatggccctgaggcggccgcagggcttggcggggtccggaggttgacctcgcccccgcagccggccttcgaggctgcctcctccaggcagcctctggggcccgcgcccgcgcctgctcaggctcccgtgttcaggctgcccatcccctccccaccggcgtcccggacgttgggacctgtgaccgtggcctcgggctgggcttccaaagccggccgcagcccggcgacccccgaggcctctcgccccgggcccctagacctctcactatgaccgcggccgccgcctccaactgggggctgatcacgaacatcgtgaacagcatcgtaggggtcagtgtcctcaccatgcccttctgcttcaaacagtgcggcatcgtcctgggggcgctgctcttggtcttctgctcatggatgacgcaccagtcgtgcatgttcttggtgaagtcggccagcctgagcaagcggaggacctacgccggcctggcattccacgcctacgggaaggcaggcaagatgctggtggagaccagcatgatcgggctgatgctgggcacctgcatcgccttctacgtcgtgatcggcgacttggggtccaacttctttgcccggctgttcgggtttcaggtgggcggcaccttccgcatgttcctgctgttcgccgtgtcgctgtgcatcgtgctcccgctcagcctgcagcggaacatgatggcctccatccagtccttcagcgccatggccctcctcttctacaccgtgttcatgttcgtgatcgtgctctcctctctcaagcacggcctcttcagtgggcagtggctgcggcgggtcagctacgtccgctgggagggcgtcttccgctgcatccccatcttcggcatgtccttcgcctgccagtcccaggtgctgcccacctacgacagcctggatgagccgtcagtgaaaaccatgagctccatatttgcttcctcccttaatgtggtcaccaccttctacgtcatggtggggtttttcggctacgtcagcttcaccgaggccacggccggcaacgtgctcatgcactttccctccaacctggtgacggagatgctccgtgtgggcttcatgatgtcagtggctgtgggcttccccatgatgatcctgccatgcaggcaggccctgagcacgctgctgtgtgagcagcagcaaaaagatggcacctttgcagcagggggctacatgccccctctccggtttaaagcacttaccctctctgtggtgtttggaaccatggttggtggcatccttatccccaacgtggagaccatcctgggcctcacaggagcgaccatgggaagcctcatctgcttcatctgccccggcgctgatctacaagaaaatccacaagaacgcactttcctcccaggtggtgctgtgggtcggcctgggcgtcctggtggtgagcactgtcaccacactgtctgtgagcgaggaggtccccgaggacttggcagaggaagcccctggcggccggcttggagaggccgagggtttgatgaaggtggaggcagcgcggctctcagcccaggatccggttgtggccgtggctgaggatggccgggagaagccgaagctgccgaaggagagagaggagctggagcaggcccagatcaaggggcccaggcggaacgatacggcagcgccgcggagcctcggttggcctcggatagccggtcccccgcctgtccccgccggcgggccgcccccccctccacgcgccccgcgcgcgcgggagggcgcgtgccccgccgcgcgccgggaccggggtccggtgcggagtgcccttcgtcctgggaaacggggcgcggctggaaag

SEQ ID NO: 24 - DNA, 1505 bp, Homo sapiens
  CDS (231)..(1505)
ccaagagattctgattcaacaggtctgacgtggagctggagaatttgcatttgtagtaagtttcaggtgttgctactgctgcttgtccaggactactgattattctcgtgtccacggacagcagaatacggctgtaataggtagctgttaaggtagatgttaaggccattgttactatcgtcaactgaggctaagtcctgggtgggctttttgctgtgccaaatgcccccatgaagtcgccgttctaccgctgccagaacaccacctctgtggaaaaaggcaactcggcggtgatgggcggggtgctcttcagcaccggcctcctgggcaacctgctggccctggggctgctggcgcgctcggggctggggtggtgctcgcggcgtccactgcgcccgctgccctcggtcttctacatgctggtgtgtggcctgacggtcaccgacttgctgggcaagtgcctcctaagcccggtggtgctggctgcctacgctcagaaccggagtctgcgggtgcttgcgcccgcattggacaactcgttgtgccaagccttcgccttcttcatgtccttctttgggctctcctcgacactgcaactcctggccatggcactggagtgctggctctccctagggcaccctttcttctaccgacggcacatcaccctgcgcctgggcgcactggtggccccggtggtgagcgccttctccctggctttctgcgcgctacctttcatgggcttcgggaagttcgtgcagtactgccccggcacctggtgctttatccagatggtccacgaggagggctcgctgtcggtgctggggtactctgtgctctactccagcctcatggcgctgctggtcctcgccaccgtgctgtgcaacctcggcgccatgcgcaacctctatgcgatgcaccggcggctgcagcggcacccgcgctcctgcaccagggactgtgccgagccgcgcgcggacgggagggaagcgtcccctcagcccctggaggagctggatcacctcctgctgctggcgctgatgaccgtgctcttcactatgtgttctctgcccgtaattgtgagtccccgggccccgaggcagcagggcactgagactgtccggccgcggatgcggggcgggaagggtggagcggatcgggatggacgcggcgccaggcgagctgcgccctgggccaggaagtatcgcgcttactatggagcatttaaggatgtcaaggagaaaaacaggacctctgaagaagcagaagacctccgagccttgcgatttctatctgtgatttcaattgtggacccttggatttttatcattttcagatctccagtatttcggatattttttcacaagattttcattagacctcttagctacctattacagccgtattctgctgtccgtggacacggtaagatcttaggttccaagattttacttcaaattacaccttcaaaactggagcagcatatagccgaaaaggagcacaactga

SEQ ID NO: 25 - DNA, 1707 bp, Homo sapiens
  CDS (1)..(1707)
atggcctcggcgctgatctatgtctccaagttcaagtccttcgtgatcttggtcgggaccccgctcctgctgctgccactcgtcattctgatgcccgccaagtttgtcaggtgtgcctacgtcatcatcctcatggccatttactggtgcacagaagtcatccctctggctgtcacctctctcatgcctgtcttgcttttcccactcttccagattctggactccaggcaggtgtgtgtccagtacatgaaggacaccaacatgctgttcctgggcggcctcatcgtggccgtggctgtggagcgctggaacctgcacaagaggatcgccctgcgcacgctcctctgggtgggggccaagcctgcacggctgatgctgggcttcatgggcgtcacagccctcctgtccatgtggatcagtaacacggcaaccacggccatgatggtgcccatcgtggaggccatattgcagcagatggaagccacaagcgcagccaccgaggccggcctggagctggtggacaagggcaaggccaaggagctgccagggagtcaagtgatttttgaaggccccactctggggcagcaggaagaccaagagcggaagaggttgtgtaaggccatgaccctgtgcatctgctacgcggccagcatcgggggcaccgccaccctgaccgggacgggacccaacgtggtgctcctgggccagatgaacgagttgtttcctgacagcaaggacctcgtgaactttgcttcctggtttgcatttgcctttcccaacatgctggtgatgctgctgttcgcctggctgtggctccagtttgtttacatgagattcaattttaaaaagtcctggggctgcgggctagagagcaagaaaaacgagaaggctgccctcaaggtgctgcaggaggagtaccggaagctggggcccttgtccttcgcggagatcaacgtgctgatctgcttcttcctgctggtcatcctgtggttctcccgagaccccggcttcatgcccggctggctgactgttgcctgggtggagggtgagacaaagtatgtctccgatgccactgtggccatctttgtggccaccctgctattcattgtgccttcacagaagcccaagtttaacttccgcagccagactgaggaagaaaggaaaactccattttatccccctcccctgctggattggaaggtaacccaggagaaagtgccctggggcatcgtgctgctactagggggcggatttgctctggctaaaggatccgaggcctcggggctgtccgtgtggatggggaagcagatggagcccttgcacgcagtgcccccggcagccatcaccttgatcttgtccttgctcgttgccgtgttcactgagtgcacaagcaacgtggccaccaccaccttgttcctgcccatctttgcctccatgtctcgctccatcggcctcaatccgctgtacatcatgctgccctgtaccctgagtgcctcctttgccttcatgttgcctgtggccacccctccaaatgccatcgtgttcacctatgggcacctcaaggttgctgacatggtgaaaacaggagtcataatgaacataattggagtcttctgtgtgtttttggctgtcaacacctggggacgggccatatttgacttggatcatttccctgactgggctaatgtgacacatattgagacttag

SEQ ID NO: 26 - DNA, 1217 bp, Homo sapiens
  CDS (108)..(1217)
cacgggcacagctcgccagcactgcgaacccggatgggtcgtcgggcgcggccctcagcagagctgccttcacagatgtggtgcccagttctgagaaatcgagaaacatgataaggaattggctgactatttttatcctttttcccctgaagctcgtagagaaatgtgatagtcagccccaggaaggggaccagtgccaggagtcaagcgtcagcctcactgttcctcctgtcgtaaagctggagaacggcagctcgaccaacgtcagcctcaccctgcggccaccattaaatgcaaccctggtgatcacttttgaaatcacatttcgttccaaaaatattactatccttgagctccccgatgaattccagaagggatttagtggccacttaacaaatatgcaagcaacgttgcaaggaatatctgttaaaaataagaaaaacccgaggatacgctttcttgtgatccgcagcagcgccattagcatcataaaccaggtgattggctggatctactttgtggcctggtccatctccttctaccctcaggtgatcatgaattggaggcggaaaagtgtcattggtctgagcttcgacttcgtggctctgaacctgacgggcttcgtggcctacagtgtattcaacatcggcctcctctgggtgccctacatcaaggagcagtttctcctcaaataccccaacggagtgaaccccgtgaacagcaacgacgtcttcttcagcctgcacgcggttgtcctcacgctgatcatcatcgtgcagtgctgcctgtatgagcgcggtggccagcgcgtgtcctggcctgccatcggcttcctggtgctcgcgtggctcttcgcatttgtcaccatgatcgtggctgcagtgggagtgatcacgtggctgcagtttctcttctgcttctcctacatcaagctcgcagtcacgctggtcaagtattttccacaggcctacatgaacttttactacaaaagcactgagggctggagcattggcaacgtgctcctggacttcaccgggggcagcttcagcctcctgcagatgttcctccagtcctacaacaacgaccagtggacgctgatcttcggagacccaaccaagtttggactcggggtcttctccatcgtcttcgacgtcgtcttcttcatccagcacttctgtttgtacagaaagagaccggggtatgaccagctgaactag

SEQ ID NO: 27 - DNA, 454 bp, Homo sapiens
  CDS (53)..(454)
gaattcccgggtcgagcctcgcccctctgctccgactcgccggaccgacgcgatggcctcagaagtggtgtgcgggctcatcttcaggctgctgctgcccatctgcctggcagtagcatgtgcattccgatacaatgggctctcctttgtctaccttatctacctcttgctcattcctctgttctcagaaccaacaaaaacgacgatgcaaggacatacgggacggttattaaagtctctgtgcttcatcagtctttccttcctgttgctgcacatcattttccacatcacgttggtgagccttgaagctcaacatcgtattgcacctggctacaactgcaaaaagtcacaatacctggacacttcaggtgggacctctactagtaccatgaagaagggagtggtgaagggaggtgatggtgaagggaggccttccttgcccaaccagtattaa

SEQ ID NO: 28 - DNA, 937 bp, Homo sapiens
  CDS (44)..(811)
gaatgtgtacacgcccagcttcctgcctgttactctccacagtatgcgaagaatatccctgacttctagccctgtgcgccttcttttgtttctgctgttgctactaatagccttggagatcatggttggtggtcactctctttgcttcaacttcactataaaatcattgtccagacctggacagccctggtgtgaagcgcaggtcttcttgaataaaaatcttttccttcagtacaacagtgacaacaacatggtcaaacctatgggcctcctggggaagaaggtaaatgccaccagcacttggggagagttgacccaaacgctgggagaagtggggcgagacctcaggatgctcctttgtgacatcaaaccccagataaagaccagtgatccttccactctgcaagtcgagatgttttgtcaacgtgaagcagaacggtgcactggtgcatcctggcagttcgccaccaatggagagaaatccctcctctttgacgcaatgaacatgacctggacagtaattaatcatgaagccagtaagatcaaggagacatggaagaaagacagagggctggaaaagtatttcaggaagctctcaaagggagactgcgatcactggctcagggaattcttagggcactgggaggcaatgccagaaccgacagtgtcaccagtaaatgcttcagatatccactggtcttcttctagtctaccagatagatggatcatcctgggggcattcatcctgttacttttaatgggaattgttctcatctgtgtctggtggcaaaatggcagaagatccacctagaggtgataccacggcggcgcagagttgttcacctgtggtcctcgatcgctgacagccttggctcccactgctgtgtgttccctgagtcaagtggaggcggagcctgcaatgagcggagatcgcgct

SEQ ID NO: 29 - DNA, 1181 bp, Homo sapiens
  CDS (129)..(1181)
caggcaggtgcaggcgccgcggggccggatcctccgcgcggccgagtccatctcctgggaaatggggcggacagtgtttccttgactgactattgtgagcgccctctctctccggcggagcggagaccatggcccccactcagggcccccgggccccgctggaattcggagggcccctgggcgccgcggctctgctactgctgctgcccgccaccatgttccacctgctcctggcggcccgttcgggccccgcgcgcctgctgggtccacccgcgtccctgcccgggctggaggtgctgtggagcccacgggcgctgctgctgtggctcgcctggctcggcctgcaggcggcgctctacctactgccggcgcgcaaggtggccgaggggcaggaattgaaggacaagagtcgcctgcgctatcctattaacggcttccaggccctggtgctgacagccctgttggtggggctggggatgtcagcggggctgcctctgggggcgctcccggaaatgctcctgcccttggcgtttgtcgccaccctcaccgctttcatcttcagcctttttctctacatgaaggcgcaggtagccccagtttcggccctggcacctggggggaactcaggcaatccgatttacgacttttttctgggacgagagctcaaccctcgtatctgtttcttcgacttcaaatatttctgtgaactgcgacccggcctcatcggctgggtcctcatcaacctggccctgttgatgaaggaggcagagcttcgaggcagtccctcactggccatgtggctggtcaatggcttccagttgctctacgtgggtgatgccctctggcacgaggaggccgtcctcaccaccatggatatcacacatgacgggtttggcttcatgctggcgtttggggacatggcctgggtgcccttcacctacagcctgcaggcccagttcctgctgcaccacccgcagcccctggggttgcccatggcctctgtcatctgcctcatcaatggggtgtcacacctgctgccctacttctacctcctctacttcaccgcgctgctggtgcaccgtgaggcccgggatgagcggcagtgcctgcagaagtacggcctggcctggcaggagtactgccggcgtgtgccttaccgcatcatgccctacatctactga

SEQ ID NO: 30 - DNA, 2952 bp, Homo sapiens
  CDS (1)..(2952)
atgcggctgggctccgggactttcgctacctgttgcgtagcgatcgaggtgctagggatcgcggtcttccttcggggattcttcccggctcccgttcgttcctctgccagagcggaacacggagcggagcccccagcgcccgaaccctcggctggagccagttctaactggaccacgctgccaccacctctcttcagtaaagttgttattgttctgatagatgccttgagagatgattttgtgtttgggtcaaagggtgtgaaatttatgccctacacaacttaccttgtggaaaaaggagcatctcacagttttgtggctgaagcaaagccacctacagttactatgcctcgaatcaaggcattgatgacggggagccttcctggctttgtcgacgtcatcaggaacctcaattctcctgcactgctggaagacagtgtgataagacaagcaaaagcagctggaaaaagaatagtcttttatggagatgaaacctgggttaaattattcccaaagcattttgtggaatatgatggaacaacctcatttttcgtgtcagattacacagaggtggataataatgtcacgaggcatttggataaagtattaaaaagaggagattgggacatattaatcctccactacctggggctggaccacattggccacatttcagggcccaacagccccctgattgggcagaagctgagcgagatggacagcgtgctgatgaagatccacacctcactgcagtcgaaggagagagagacgcctttacccaatttgctggttctttgtggtgaccatggcatgtctgaaacaggaagtcacggggcctcctccaccgaggaggggaatacacctctgattttaatcagttctgcgtttgaaaggaaacccggtgatatccgacatccaaagcacgtccaacagacggatgtggctgcgacactggcgatagcacttggcttaccgattccaaaagacagtgtagggagcctcctattcccagttgtggaaggaagaccaatgagagagcagttgagatttttacatttgaatacagtgcagcttattaaactgttgcaagagaatgtgccgtcatatgaaaaagatcctgggtttgagcagtttaaaatgtcagaaagattgcatgggaactggatcagactgtacttggaggaaaagcattcagaagtcctattcaacctgggctccaaggttctcaggcagtacctggatgctctgaagacgctgagcttgtccctgagtgcacaagtggcccagtacgacatctattcgatgatggtggggactgtcgtggttttggaggttctcaccctgctcctgctcagcgtcccacaggcactgcgcagaaaggctgagctggaagtcccactgtcatctcctgggttttctctgctcttttatttggtgatcctggttctttcggccgttcacgtcattgtgtgcacctcagctgaaagttcgtgctacttctgtggcctctcgtggctggcggcaggtggggtgatggtgctggcctcggcgctgctgtgtgtgattgtgtctgttctgaccaacgtgctcgtgggtggaaacaccccaaggaagaaccccatgcatcccagctcaaggtggtcagagctagaccttcttattctgttggggacggcgggccacgtcttgagcctgggcgccagcagcttcgtggaggaggagcaccagacctggtacttccttgtgaacaccctgtgtctagctctgagccaagaaacctacagaaactactttctgggagatgacggtgagcctccgtgtggcctctgtgtggaacaagggcatgacggggccacagcagcgtggcaggacgggcctggctgtgatgtcctggagcgagacaaaggccacggaagcccctctacctccgaagtgctcagaggccgcgagaagtggatggtgctggccagtccgtggctaatactggcctgctgccggctgctgcgctccctaaaccagacaggtgtgcagtgggctcaccggcctgacctcggccactggctcaccagctctgaccacaaagccgagctctctgtcctggctgccctctccctcctcgtagtttttgtgctggtgcagagggggtgctcccctgtgtccaaggctgccctggcgctggggctgctgggcgtctactgctaccgggcggccatcgggagtgtccggttcccgtggcggccggacagcaaggacatttccaagggtattattgaagctcgttttgtttatgtctttgtccttggcattctgttcacgggcaccaaagacttacttaaatctcaagtcattgctgcagacttcaaactcaagactgtaggtttatgggagatatatagtggattagttcttctggcagccttgctctttagaccacataatcttccggtcttagcatttagcctcttgattcagactctaatgactaaattcatctggaagcccctgagacacgatgcagctgagattactgtgatgcattattggtttggtcaagcattcttctattttcagggcaactccaacaacattgccaccgtggacatctccgcaggcttcgtgggcttagacacctacgtggaaatcccagccgtgctcctgacagcgtttgggacgtacgcagggcctgtgctgtgggccagccacttagtgcacttcctgagctcagaaacacgcagtggttcagcactgagtcatgcttgcttctgctacgcactgatttgttctattccagttttcacgtacatcgttttggtgacatctctgcgttatcatttatttatatggagtgtattttctccaaaacttctctacgagggaatgcacctgctcattacagctgctgtctgtgtattcttcacggcaatggatcaaaccagactcacacagtcttag

SEQ ID NO: 31 - DNA, 1496 bp, Homo sapiens
  CDS (48)..(1178)
agacaactcaggagatctgttggaaagagaacgatagaggaaaatatatgaatgttgccatctttagaacaggccccatgctgctctggacggctgtgctgctctttgttccctgtgttgggaaaactgtctggctgtacctccaagcctggccaaaccctgtgtttgaaggagatgccctgactctgcgatgtcagggatggaagaatacaccactgtctcaggtgaagttctacagagatggaaaattccttcatttctctaaggaaaaccagactctgtccatgggagcagcaacagtgcagagccgtggccagtacagctgctctgggcaggtgatgtatattccacagacattcacacaaacttcagagactgccatggttcaagtccaagagctgtttccacctcctgtgctgagtgccatcccctctcctgagccccgagagggtagcctggtgaccctgagatgtcagacaaagctgcaccccctgaggtcagccttgaggctccttttctccttccacaaggacggccacaccttgcaggacaggggccctcacccagaactctgcatcccgggagccaaggagggagactctgggctttactggtgtgaggtggcccctgagggtggccaggtccagaagcagagcccccagctggaggtcagagtgcaggctcctgtatcccgtcctgtgctcactctgcaccacgggcctgctgaccctgctgtgggggacatggtgcagctcctctgtgaggcacagaggggctcccctccgatcctgtattccttctaccttgatgagaagattgtggggaaccactcagctccctgtggtggaaccacctccctcctcttcccagtgaagtcagaacaggatgctgggaactactcctgcgaggctgagaacagtgtctccagagagaggagtgagcccaagaagctgtctctgaagggttctcaagtcttgttcactcccgccagcaactggctggttccttggcttcctgcgagcctgcttggcctgatggttaatgctgctgcacttctggtttatgtgagatcctggagaaaagctgggccccttccatcccagataccacccacagctccaggtggagagcagtgcccactatatgccaaggaaccagccagttgctggcgggagtgaacaagacttgagaacccttcagagacagcttcttgggctcactcctctctctggagacactgttctcagcctcgcaggagtagttcccagcatcctgttctgacttcactgggaagaggagggaggtggttccaccacagggagctgagtggttccccacaatcttctcatcaaggtagaaggaatacaggatcggaggggagcccctctgtgcctcacagaggagctgcaccatgtcccccacagcagggtcagcaggcccgtggtgcagagtgagcacaggacgggatacaggagcctgcactctgacctccagcc

SEQ ID NO: 32 - DNA, 1118 bp, Homo sapiens
  CDS (55)..(933)
atggaaacaatcacctgtaatggatcaggggactcctcaaccaccttctaccttatgggcatcccctctctgccaaaatcccttttccttcctattttctttgtctttctcctcctctacgtgctcatcctgatgggtaatacctttatcctggtggctgtggtggccaagcccagcctccacaagcccatgtacttcttcctgataaacctctccaccttggacattcttgttaccacaaccactgtccccaagatgctgtccctgttcttgtttggggacagcttcctcagcttccctgcctgcttcctgcagatgtacctgttccacagcttctcctgctcagaagccttcatcctggtggtcatggcctatgaccgctatgtggctatctgccgcccactgcactaccctgtcctcatgacccctcagaccaacactgtcttgacaaccagtgcctggctcactgccctcctcctgcccattccagcagtggtacagacctcccagatggcatttgacatcattgtccacatctaccactgcttctgtgaccacctggctgtgaccttcatgggcttctgcatcgccatggtggtgtccttcctcccccttctgctggtgcttctctcctatgcccacatcttgacctcagtgctttgcatcaactgccaagaaggacgctccaaagccttctccacctgcagctcccacctcctggtggtgggcacctactattcatccattgccatagcctatgtggcctacagggctgacctgcccctagacttccacgtcatgggcaatgtggtatatgccattctcacacctgttctcaaccctgtcatctacaaactgaggaacaaggatgtcaaagcagccatcaccaagattgcatgtccccaggagccaaagaatgctaggaaaccctgattcaaagaaataacttcatcttctctcataaacatcaataacatagagggaaaagtggaaaatttagaaagcccagtagttagaacactcattctcaaaatattgtcctaggtagtcctccattataataaaatgataatttttttcttaattcatagaaaaaagagtaggatttttaaattcaa

SEQ ID NO: 33 - DNA, 342 bp, Homo sapiens
  CDS (1)..(342)
atggataagcccctcttcccattagtgcctttgcattggtttggctttggctacacagcactggttgtttctggtgggatcgttggctatgtaaaaacaggcagcgtgccgtctctggctgcagggctgctcttcggcagtctagccggcctgggtgcttaccagctgtctcaggatccaaggaacgtttgggttttcctagctacatctggtaccttggctggcattatgggaatgaggttctaccactctggaaaattcatgcctgcaggtttaattgcaggtgccagtttgctgatggtcgccaaagttggagttagtatgttcaacagaccccattag

SEQ ID NO: 34 - DNA, 3167 bp, Homo sapiens
  CDS (307)..(2085)
atgaagagggtggatattggagaccttggggctgaggaggtggtggtagttgaaattgttgcttatgatgatgagatgtatattcaagagacagacgctgtctcagaggtcattagggatggctctgggcctatcagctggtgtctgcaactagagatccaagcaatcccttccaactgggatattgtccaccagggagttgtctggtacacccaagccttcttgggtattcgccgactctttgtgactcttccagaccctttgtgtcctggccattcttgcgttttttcaatcctgagttgtacaatggtagatggagtgatgattcttcctgtgcttatcatgattgctctcccctcccctagtatggaagatgagaagcccaaggtcaaccccaaactctacatgtgtgtgtgtgaaggtctctcctgcggtaatgaggaccactgtgaaggccagcagtgcttttcctcactgagcatcaacgatggcttccacgtctaccagaaaggctgcttccaggtttatgagcagggaaagatgacctgtaagaccccgccgtcccctggccaagccgtggagtgctgccaaggggactggtgtaacaggaacatcacggcccagctgcccactaaaggaaaatccttccctggaacacagaatttccacttggaggttggcctcattattctctctgtagtgttcgcagtatgtcttttagcctgcctgctgggagttgctctccgaaaatttaaaaggcgcaaccaagaacgcctcaatccccgagacgtggagtatggcactatcgaagggctcatcaccaccaatgttggagacagcactttagcaggttctaaatttcttccgttggatgctcagcttttggtaattttgccgatcaacagtacttcacagtggtgctcagaagaagtgaaagaagatgaaattcacacaaatcaatgtattgctttaaggagctttacatgtacactaacaggccacgtgtcccggattgctgcccttcatgtctacggctattgtcactgtttgctgcttctcgcttctcctccacggcagattgtgaatggagaaaataaagatggaaaagccccaaatgtgctcattaatttcaaccagagttgtcctcttgtactaactagtatcttatttgattatgaacaagattatctggatagtgggaaaggcaggtatggtgaggtgtggaggggcagctggcaaggggagaatgttgccgtgaagatcttctcctcccgtgatgagaagtcatggttcagggaaacggaattgtacaacactgtgatgctgaggcatgaaaatatcttaggtttcattgcttcagacatgacatcaagacactccagtacccagctgtggttaattacacattatcatgaaatgggatcgttgtacgactatcttcagcttactactctggatacagttagctgccttcgaatagtgctgtccatagctagtggtcttgcacatttgcacatagagatatttgggacccaagggaaaccagccattgcccatcgagatttaaagagcaaaaatattctggttaagaagaatggacagtgttgcatagcagatttgggcctggcagtcatgcattcccagagcaccaatcagcttgatgtggggaacaatccccgtgtgggcaccaagcgctacatggcccccgaagttctagatgaaaccatccaggtggattgtttcgattcttataaaagggtcgatatttgggcctttggacttgttttgtgggaagtggccaggcggatggtgagcaatggtatagtggaggattacaagccaccgttctacgatgtggttcccaatgacccaagttttgaagatatgaggaaggtagtctgtgtggatcaacaaaggccaaacatacccaacagatggttctcagacccgacattaacctctctggccaagctaatgaaagaatgctggtatcaaaatccatccgcaagactcacagcactgcgtatcaaaaagactttgaccaaaattgataattccctcgacaaattgaaaactgactgttgacattttcatagtgtcaagaaggaagatttgacgttgttgtcattgtccagctgggacctaatgctggcctgactggttgtcagaatggaatccatctgtctccctccccaaatggctgctttgacaaggcagacgtcgtacccagccatgtgttggggagacatcaaaaccaccctaacctcgctcgatgactgtgaactgggcatttcacgaactgttcacactgcagagactaatgttggacagacactgttgcaaaggtagggactggaggaacacagagaaatcctaaaagagatctgggcattaagtcagtggctttgcatagctttcacaagtctcctagacactccccacgggaaactcaaggaggtggtgaatttttaatcagcaatattgcctgtgcttctcttctttattgcactaggaattctttgcattccttacttgcactgttactcttaattttaaagacccaacttgccaaaatgttggctgcgtactccactggtctgtctttggataataggaattcaatttggcaaaacaaaatgtaatgtcagactttgctgcattttacacatgtgctgatgtttacaatgatgccgaacattaggaattgtttatacacaactttgcaaattatttattacttgtgcacttagtagtttttacaaaactgctttgtgcatatgttaaagcttatttttatgtggtcttatgattttattacagaaatgtttttaacactatactctaaaatggacattttcttttattatcagttaaaatcacattttaagtgcttcacatttgtatgtgtgtagactgtaactttttttcagttcatatgcagaacgtatttagccattacccacgtgacaccaccgaatatattatcgatttagaagcaaagatttcagtagaattttagtcctgaacgctacggggaaaatgcattttcttcagaattatccattacgtgcatttaaactctgccagaaaaaaataactattttgttttaatctactttttgtatttagtagttatttgtataaattaaataaactgttttcaagtc

SEQ ID NO: 35 - DNA, 1716 bp, Homo sapiens
  CDS (1)..(879)
atgcggacgccggtggtgatgacgctgggcatggtgttggcgccctgcgggctcctgctcaacctgaccggcaccctggcgcccggctggcggctggtgaagggcttcctgaaccagccagtggacgtggagttgtaccagggcctgtgggacatgtgtcgcgagcagagcagccgcgagcgcgagtgcggccagacggaccagtggggctacttcgaggcccagcccgtgctggtggcgcgggcactcatggtcacctcgctggccgccacggtcctggggcttctgctggcgtcgctgggcgtgcgctgctggcaggacgagcccaacttcgtgctggcagggctctcgggcgtcgtgctcttcgtcgctggcctcctcggcctcatcccggtgtcctggtacaaccacttcttgggggaccgcgacgtgctgcccgccccggccagcccggtcacggtgcaggtcagctacagcctggtcctgggctacctgggcagctgcctcctgctgctgggcggcttctcgctggcgctcagcttcgcgccctggtgcgacgagcgttgtcgccgccgccgcaagggaccctccgccgggcctcgccgcagcagcgtcagcaccatccaagtggagtggcccgagcccgacctggcgcccgccatcaagtactacagcgacggccagcaccgaccgccgcctgcccagcaccgcaagcccaagcccaagcccaaggtcggcttccccatgccgcggccgcggcccaaggcctacaccaactcggtggacgtcctcgacggggaggggtgggagtcccaggacgctccctcgtgcagcacccacccctgcgacagctcgctgccctgcgactccgacctctagacgcttgtagagcctggggggcgccgggtggcaaaggactcacccccgcacaggcccgcctggcttcgagttggaacccggacacttgcccctcactggtgtggatggaaatctgcctttcctgggaccaaacaggactccttggacgattagttcaggttgggtttggttttcttcttaaagagtttagttttcctctccagagggatcagggtcctcttagggagtgacgggcttttcatatatttttgctgaagaatatatggaaagggtggcatttgcgtcacgtggaccagggacagtgctgaaatcagcagtgctcagaaacaatttaacatgttgaaacgacaatattctaaaatactgatgaatcttgcatcaatataattattgggttttttttctttttcctgctgtataactccttgccatgcaaactctcaagaggccaatatattcctggccatgtttgaatgagcctcttaaaataaacttagagccatgcaaatgccagcagcttaatggatttcatggaatgaaataccgtgattaactcatagctacatatcattgcataaatgggatttatcttttttctcacttattttttgctgtgaaagtcgagggcatgcaagagtttctcttccagaagccaggaggagaacgaaggtcctaatgctgtactattccaccctttggacgcctcatccaggacgcagaggactctaggtttaacattttgtacaaaacagaacctgttaatcacattaaagcacatatgctatatatcttttatttataaataaaattttaaaacaataaaaaaaaaaaaaaaaa

SEQ ID NO: 36 - DNA, 1152 bp, Homo sapiens
  CDS (1)..(1152)
atggggctgggcccggtcttcctgcttctggctggcatcttcccttttgcacctccgggagctgctgctgagccccacagtcttcgttataacctcacggtgctgtcctgggatggatctgtgcagtcagggtttcttgctgaggtacatctggatggtcagcccttcctgcgctatgacaggcagaaatgcagggcaaagccccagggacagtgggcagaagatgtcctgggaaataagacatgggacagagagaccagggacttgacagggaacggaaaggacctcaggatgaccctggctcatatcaaggaccagaaagaaggcttgcattccctccaggagattagggtctgtgagatccatgaagacaacagcaccaggagctcccagcatttctactacgatggggagctcttcctctcccaaaacgtggagactgaggaatggacagtgccccagtcctccagagctcagaccttggccatgaacgtcaggaatttcttgaaggaagatgccatgaagaccaagacacactatcacgctatgcatgcagactgcctgcaggaactacggcgatatctagaatccagcgtagtcctgaggagaagagtgccccccatggtgaatgtcacccgcagcgaggcctcagagggcaacatcaccgtgacatgcagggcttccagcttctatccccggaatatcacactgacctggcgtcaggatggggtatctttgagccacgacacccagcagtggggggatgtcctgcctgatgggaatggaacctaccagacctgggtggccaccaggattcgccaaggagaggagcagaggttcacctgctacatggaacacagcgggaatcacggcactcaccctgtgccctctgggaaggcgctggtgcttcagagtcaacggacagactttccatatgtttctgctgctatgccatgttttgttattattattattctctgtgtcccttgttgcaagaagaaaacatcagcggcagagggtccagagcttgtgagcctgcaggtcctggatcaacacccagttgggacaggagaccacagggatgcagcacagctgggatttcagcctctgatgtcagctactgggtccactggttccactgagggcgcctag

SEQ ID NO: 37 - DNA, 1329 bp, Homo sapiens
  CDS (587)..(1285)
ctgtggacctgaaggcaaccgaggagttagccaggggcagttctgtggtaacaagaaagactcttgggggctgtatgcctccactgccttggcgcctcttgcctgcaattgccgcgctgcccctcgtgcctcccttgatgggcgttccggggtcgtcactgtcctctgcgcccctgggcactggcagcgcgggccgggcagcggggagggaggcgggaagcagagcgggaggcgccccgggcttgcgcgccgcggtgctccacgagggatttgccgccttcagctgcagcagctgcagcggcggcggcgggaagaggggtggagggtggtgaggagggccggagcccgggccaggagggagggaggggagccgggaggctgtgccaggcgagccggaggggtgctccgcgctcccccgccctccttccgggagcgaggatgcagactctgaaactggtgctgctgggctgaggcggaggcaggggagttgcagcgcgcgaggctccgtgagtgtgtctcctgcgcgctgagaggcggggggaggcggaggaccaggaggaggaggaggaggaggaggagggggagaatgcccggagccgccgccgctgccgccgccgccgccgccgcgatgctcccggctcaggaggctgccaagctgtaccacaccaactatgtgcggaactcgcgggccatcggcgtgctgtgggccatcttcaccatctgctttgccatcgtcaacgtggtgtgcttcatccagccctactggataggcgacggcgtggacaccccgcaagccggctatttcgggctcttccactactgcatcggcaacggcttctcccgggagctgacctgcaggggcagcttcacggacttctccacgctgccctcgggcgccttcaaagccgcctccttctttatcggcctctccatgatgctcatcattgcctgcatcatttgctttaccctcttcttcttctgcaacacggccactgtgtacaagatatgtgcctggatgcagctcacctccgctgcctgccttgtgcttggctgtatgattttccctgatggctgggactcagatgaagtaaaacggatgtgtggagaaaagacagacaagtacactcttggggcttgctcagtccgctgggcatacatcctggctattattggaattttggatgccctgatcctctcatttctagcatttgtgcttggtaatcgacaagacagcttgatggcagaggaactgaaggcagaaaacaaagatgatggaaatgcttaaggcaaactaaggtagtgtgagaccacaccatgccgggcgcggtg

SEQ ID NO: 38 - DNA, 3286 bp, Homo sapiens
  CDS (61)..(1788)
gccgcctccggggcggccgtcgtcccggagcgccccgagctggcgcggcatgggcgcggcatgagcgtggagccgccgccggagctggaggagaaggcggcgtcggagcccgaggcgggagccatgccggagaagcgcgcgggcgcgcaggccgcggggagcacctggctacaaggctttggcccaccaagtgtgtaccatgctgctattgtcatcttccttgaattctttgcgtggggccttttgacaactccaatgttgactgttctacatgaaacattttctcaacacacattcctcatgaatggtctcattcaaggtgtaaagccactgtggccctcggatccccctggactggctacaaataacaaatacagcctttcccacaggtgcagcttctggggcttggtctacagtgttcagaaggacacattgcgtaaaaaaaagggcctgctctcttttttgagtgccccactcattggtgccctgtctgatgtgtgggggaggaagccctttctcctcggcactgtattctttacctgcttcccaatcccactgatgaggatcagcccatggtggtattttgcgatgatttctgtgtctggagtcttctcggtcacgttttctgttatatttgcctatgtagctgatgtcactcaggagcacgagcgaagtacagcttatggatgggtctcggccacgtttgcggctagtcttgtcagcagcccggccattggagcatatctttctgccagttacggagacagcctcgttgtgctggtggccacagtggtggctcttctggacatctgcttcatcttagtggctgttccagaatctctgcctgagaaaatgagaccggtttcctggggagctcagatttcttggaaacaagcagacccttttgcgatcaaaataatgaagctgatgttccagaacattggcaacattaatgtgtattggcattttaagtgtgttctttctgcttattctcagtcgttgaagaaagttggaaaagattctactgtcttactaatctgcatcaccgtgtttctttcataccttcctgaagctggacagtattcaagtttttttctctatctcaggcaggtcataggttttggatctgttaaaattgcagcattcatagctatggtaggaattctgtctattgtggctcagacggcctttcttagcatcttgatgagatcattaggaaataagaatactgtcctccttggcttgggcttccagatgctccagttagcctggtacggttttggatcacaggcctggatgatgtgggcagcagggaccgtggctgccatgtccagcatcacgtttccggcaatcagtgccctcgtctctcggaatgcagagtcagatcagcaaggagttgcccaggggatcataactggaataagaggactatgcaatggcctggggccagcactgtatggcttcatattctacatgttccatgtggaactgactgagttgggcccgaaattgaattctaacaacgttcccctgcagggagctgtcatcccaggcccgccgtttttatttggggcatgtatagtccttatgtcttttctggttgccttattcattcctgaatacagtaaagccagtggagttcaaaaacacagtaacagcagcagcggcagcctgaccaacaccccagaacggggcagtgatgaggacattgagccactactgcaagacagcagcatctgggagctctcttcatttgaggagcctgggaatcagtgcactgagctgtaaactcggcagaaagtgggattctgcatacgccatctctgagagccatggagggagccacacccctggtgacttcatggtgctggatgggagacgctagcggcatccttcagggccaagtttgataaataccaccgccatcattctgctcatcctcctcctgtttttttttttctcttacattctttttttttttcctgtttatacattagaacaagataagatttgaaatacttccttgcaaataatgtgcaactcccaaggtgaaactcaaatagaaaaagtcatctctctggtagaaaggatggctttcctgtaatgactatagagtaagagtggcagcaatctttccatgcccttttcagcagaaggcacagaacagtagcgggactgccatctctggcaagatttcaggtaaagaatctcttcttaatttctaccttcctgtttctctgaatcagcccataggtgttgatgagtggccactcttaaagagtcactcagtatcagggatctactgtctttgttcaaaggtcaaataaaaacctagtctccttttattctactttctattcttagctagaatgaaactcagcatatatacacttctggacataataatattgaatagtaattacctttactagatgaaagaaattttcattacaaacttaaatcatgtaaaactcaacaactcagattcctggacctggtgtcctggttgggtccaaggtgattttacagaagaaaaaaacaactcaagcattctggtggcaacatagagattgtaggctgcttctaagaaagttattaacaatttggaaattcctaagtaggatgagagttagtaactggatacgagtgaagtttatatccaagttcagactcaaaggcattattatgatttgcttcttcccatgtcttccatgtcctgcttctcaaagtttttctcatccatcacactcctgccttaactgctctgagtatgcatttgttttcaattcatctttatttcaatctgtttaacttttgaatcgcatgggaatacgcacattaagttcctttctaaaataaggttttatgaagctgagtttcacgataagtgtcttgctattttttgagatgttttatggacaaagaaaactttacagatttatatgtattttgctgcaccagtaaatggaccattaactagggcccacctttaacagagcacccctttgaaagttttataggtatgaaatatatgtagatatttgtaaagggttttaattttttttttgatggggtgctgtgtaaatcttgtatttataaatgtaatgaaggtattgacagaaaaaaatatatacaacttttataaaggattgtgtactgactgaatacatttaaaagaaaatatattttgaaacctgttctgctatgaacagagataacatatctttttactatgctattggtttttaggttaagcttcctaatgcataataaatttacagtggtt

SEQ ID NO: 39 - DNA, 3490 bp, Homo sapiens
  CDS (1)..(1992)
atgaagaggacaagctgtcccagtaggccccggactgccctggttttaacactaaatgtccgacatcctgataacccttactcccaggcaaatcaggccagttggtcatctaattggaggttatcaaaggagccctcggcgccgccgcctgacccgcaggccgccgcgggccgcagagcccatgagggcgcgggcaccgccgccgcctccgcggcgtcgccgtcgtcccggagcgccccgagctggcgcgggcatggccgcggcatgagcgtggagccgccgccggagctggaggagaaggcggcgtcggagcccgaggcgggagccatgccggagaagcgcgcgggcgcgcaggccgcggggagcacctggctacaaggctttggcccaccaagtgtgtaccatgctgctattgtcatcttccttgaattctttgcgtggggccttttgacaactccaatgttgactgttctacatgaaacattttctcaacacacattcctcatgaatggtctcattcaaggtgtaaagccactgtggccctcggatccccctggactggctacaaataacaaatacagcctttcccacaggtgcagcttctggggcttggtctacagtgttcagaaggacacattgcgtaaaaaaaagggcctgctctcttttttgagtgccccactcattggtgccctgtctgatgtgtgggggaggaagccctttctcctcggcactgtattctttacctgcttcccaatcccactgatgaggatcagcccatggtggtattttgcgatgatttctgtgtctggagtcttctcggtcacgttttctgttatatttgcctatgtagctgatgtcactcaggagcacgagcgaagtacagcttatggatgggtctcggccacgtttgcggctagtcttgtcagcagcccggccattggagcatatctttctgccagttacggagacagcctcgttgtgctggtggccacagtggtggctcttctggacatctgcttcatcttagtggctgttccagaatctctgcctgagaaaatgagaccggtttcctggggagctcagatttcttggaaacaagcagacccttttgcgatcaaaataatgaagctgatgttccagaacattggcaacattaatgtgtattggcattttaagtgtgttctttctgcttattctcagtcgttgaagaaagttggaaaagattctactgtcttactaatctgcatcaccgtgtttctttcataccttcctgaagctggacagtattcaagtttttttctctatctcaggcaggtcataggttttggatctgttaaaattgcagcattcatagctatggtaggaattctgtctattgtggctcagacggcctttcttagcatcttgatgagatcattaggaaataagaatactgtcctccttggcttgggcttccagatgctccagttagcctggtacggttttggatcacaggcctggatgatgtgggcagcagggaccgtggctgccatgtccagcatcacgtttccggcaatcagtgccctcgtctctcggaatgcagagtcagatcagcaaggagttgcccaggggatcataactggaataagaggactatgcaatggcctggggccagcactgtatggcttcatattctacatgttccatgtggaactgactgagttgggcccgaaattgaattctaacaacgttcccctgcagggagctgtcatcccaggcccgccgtttttatttggggcatgtatagtccttatgtcttttctggttgccttattcattcctgaatacagtaaagccagtggagttcaaaaacacagtaacagcagcagcggcagcctgaccaacaccccagaacggggcagtgatgaggacattgagccactactgcaagacagcagcatctgggagctctcttcatttgaggagcctgggaatcagtgcactgagctgtaaactcggcagaaagtgggattctgcatacgccatctctgagagccatggagggagccacacccctggtgacttcatggtgctggatgggagacgctagcggcatccttcagggccaagtttgataaataccaccgccatcattctgctcatcctcctcctgtttttttttttctcttacattctttttttttttcctgtttatacattagaacaagataagatttgaaatacttccttgcaaataatgtgcaactcccaaggtgaaactcaaatagaaaaagtcatctctctggtagaaaggatggctttcctgtaatgactatagagtaagagtggcagcaatctttccatgcccttttcagcagaaggcacagaacagtagcgggactgccatctctggcaagatttcaggtaaagaatctcttcttaatttctaccttcctgtttctctgaatcagcccataggtgttgatgagtggccactcttaaagagtcactcagtatcagggatctactgtctttgttcaaaggtcaaataaaaacctagtctccttttattctactttctattcttagctagaatgaaactcagcatatatacacttctggacataataatattgaatagtaattacctttactagatgaaagaaattttcattacaaacttaaatcatgtaaaactcaacaactcagattcctggacctggtgtcctggttgggtccaaggtgattttacagaagaaaaaaacaactcaagcattctggtggcaacatagagattgtaggctgcttctaagaaagttattaacaatttggaaattcctaagtaggatgagagttagtaactggatacgagtgaagtttatatccaagttcagactcaaaggcattattatgatttgcttcttcccatgtcttccatgtcctgcttctcaaagtttttctcatccatcacactcctgccttaactgctctgagtatgcatttgttttcaattcatctttatttcaatctgtttaacttttgaatcgcatgggaatacgcacattaagttcctttctaaaataaggttttatgaagctgagtttcacgataagtgtcttgctattttttgagatgttttatggacaaagaaaactttacagatttatatgtattttgctgcaccagtaaatggaccattaactagggcccacctttaacagagcacccctttgaaagttttataggtatgaaatatatgtagatatttgtaaagggttttaattttttttttgatggggtgctgtgtaaatcttgtatttataaatgtaatgaaggtattgacagaaaaaaatatatacaacttttataaaggattgtgtactgactgaatacatttaaaagaaaatatattttgaaacctgttctgctatgaacagagataacatatctttttactatgctattggtttttaggttaagcttcctaatgcataataaatttacagtggtt

SEQ ID NO: 40 - DNA, 2463 bp, Homo sapiens
  CDS (244)..(2463)
ggcgcgcgagagctgctagggcggtttctctgcctcgggcctgttgggcagggccggctaaggtgcgcgtgctcgctggttctaacccttctgttgggcgtttctgctgagaggcgggaggcgccgagagtctgtgcgaaggtccgtggacagactgctttgcctgttgttgctcttcggaggcggcgatccccgaaggcgagctgaaatacggctgcaggctacaatttgcagccgaccattatggatgacaaggagccgaagaggtggcccaccctcagggaccgcttgtgctcggatggcttcttatttccccaataccccattaaaccgtatcatctgaaggggatccacagagctgtcttctatcgtgatctggaggaactgaagttcgttctgctcacgcgttatgacatcaataagagagacaggaaggaaaggaccgccctacatttggcctgtgccactggccaaccggaaatggtacatctcctggtgtccagaagatgtgagcttaacctctgcgaccgtgaagacaggacacctctgatcaaggctgtacaactgaggcaggaggcttgtgcaactcttctgctgcaaaatggcgccgatccaaatattacggatgtctttggaaggactgctctgcactacgctgtgtataatgaagatacatccatgatagaaaaacttctttcacatggtacaaatattgaagaatgcagcaagaatgaatatcagccactgttacttgctgtgagtcgaagaaaagtgaaaatggtggaatttttattaaagaaaaaagcaaatgtaaatgccattgattatcttggcagatcagccctcatacttgctgttactcttggagaaaaagatatagtcattcttcttctgcagcacaatattgatgtgttttctcgagatgtgtatggaaagcttgcagaagattatgccaaaagaagatcatctgcttcacgtgatcttggatccgtgaaccatgatgatattgttggttggatgttagtgtctcctcagaaacaacgagctgagaaggctacaagtgacgacaaagattctgtttcaaatatagccacagaaataaaggagggacctatatctgggacagatcacctttcagaggagaagaattttaaagaatcctgtctgttcgacagggatttaagagagcagttaactactatagataaagaaacacttcaaggagcagctaaaccagatgctcactttaggactatgccctgcgggcagcttctgcacttcctgcagaggaacaccatcatcgccgccgtctcaggggtggccatcctcatggccatcgtgctgttgctgcttgggttggcctcatacatcaggaagaaacagccatccctgcaatactggagagctgcccctggagggcgcaagggaatcccgttgctgcactcggacgcgcagtcactagacatgagagatgacggtggtggtagcagtaatggagcatttgcctttaggcctcttttaactttcacaacagcctacaagacagcagtggcttgtgttctcttaactgtgcagccagattggacctgctcagctccaggtgaaatggacagaaagcccatccctgcccggtctgaggattgggaagccttcctggaggaaaacacgcttaattggagacctgaaagaggactaggaaataggcagccccctttcctgtcttcgcatccaggaaataggttagtttcagacaagcctgcttgccggagctcagcagacaccaggccttccgggcaggcctggcccaccgtgggcctcagagctgctgctggggcattcagggaaatccaaaccggctttgtaagccccgattcctcacccagaaccggctctccattggcattgggaccagagaccccgcaagtggcctgtttgcctggacatccacctgtacgtccccagggctctcgggaggataaagagagtgactgtatccacactgcccggcacatacaggtgctgcagaaaggtctcactaaaaccctcattatcctcactagctctgggtggcctcgggctctggactccacagttcctgtatgctctccggggctgcagcacccagaccaccccgtgctgaccactccctgccccaccccaaggtgtcaggttccaccggtgctcagaggcatccccacccatcccagtggactgcagacctttgtaggtacctggtatattgagcacctcctctgtgccatgctgggcctgggctgtgagtgtggggcaggtgccccgtggctgctctgctgtgatctctgtgctgtgatccaggggctttgtgtgtggaatcacacaattcgtagcccttggaacctggtttctttcatccagcctgaggcctttgcgatgcgtttgcggaactgcgtgtctccgtatgctgttccacttaccgcggagtag

SEQ ID NO: 41 - DNA, 2252 bp, Homo sapiens
  CDS (57)..(1277)
gaggtggaggcagcagggagaaagcaaaacaatcaggatccaacttgataagtgggatggaagctgtaggaatttggaggaaagagttgctccaaccacagacggaaggaaaagctctcagggaagggacagatccagtgagaatgcattttcctagtgtcagaggtcctcccttcctgccagtgtcagggaagaggaggctagttaaagtcagtagacctcggtgtttaaaactcaggacaagacagaaatgttctagttatttcaaaaactttcgatactgctcctatgctccccatgtccgaatatgtatgcccttgacggacggcatttcttcatttgaggacctcttggctaacaatatcctcagaatatttgtctgggttatagctttcattacctgctttggaaatctttttgtcattggcatgagatctttcattaaagctgaaaatacaactcacgctatgtccatcaaaatcctttgttgtgctgattgcctgatgggtgtttacttgttctttgttggcattttcgatataaaataccgagggcagtatcagaagtatgccttgctgtggatggagagcgtgcagtgccgcctcatggggttcctggccatgctgtccaccgaagtctctgttctgctactgacctacttgactttggagaagttcctggtcattgtcttccccttcagtaacattcgacctggaaaacggcagacctcagtcatcctcatttgcatctggatggcgggatttttaatagctgtaattccattttggaataaggattattttggaaacttttatgggaaaaatggagtatgtttcccactttattatgaccaaacagaagatattggaagcaaagggtattctcttggaattttcctaggtgtgaacttgctggcttttctcatcattgtgttttcctatattactatgttctgttccattcaaaaaaccgccttgcagaccacagaagtaaggaattgttttggaagagaggtggctgttgcaaatcgtttcttttttatagtgttctctgatgccatctgctggattcctgtatttgtagttaaaatcctttccctcttccgggtggaaataccaggtcagtctcttctatcattcccaagtataatacatcgtgccttcttacgtccttcttttgacaaggccagagtctttcaaagaaacatcaatttgaactaccatccatgcatgaagatacctttgcaagagctaaggaacccaggtgaaagattatagcacctcagctccagaacgccttccacatatggaggctccaggactgccccagaaccaggcccatgtcttatggaccaaggtatcaggcccaagtccccactgatcagtcaccaaggcagcctacccaaggactccagcagtaaacctgctcataggcctcgccagctgttccagcctgaatccctggacaggctgatttgtaaacggctttccatgctgaaacccatcaaagcagagcctgcattttcacaagatccccagctgatgtacaggcccattaggactgagaagtactgctctagggacacagatgatggaatcaggccttatgctcttgctaagcagaatgagtcacaaccttacctcctctttgttctttgtggtggctacagagatgtgccacccaccgcatggcccttcaatgaagtactagtcccagctgccctcctaaaggggcagctggctttcagtgatgaacaggagtcattcattgtgactcatccacaatcatgcaaacaaccagctgaagatgagggaacaacttgttggaaggaacccaaggctctgcatgaccatttggggtacagctacttactgactgggaatgtttacctacagcttttagcagtagtaaggtttgagtttcgaatacagatccagcacctcacttctaatatctctaaactgccaaaaatcaaagtagcaccaactaaagttgggaaagaacatgaggctttcttatcacactcttacgtcagaatagaaggtatggtaaaacatgcagacacagaaatgactgtcataaaggaagtttattatactcaagagtcccctagaaaccggaggtacagcatggcatgccatgcagggggcacacagggaagcagcaggatcaggcaggaggcagggggaacaagaagaaatgtgggcaagagccttacggtggtttccatgggaaggaatgagcaaagcagg

SEQ ID NO: 42 - DNA, 1844 bp, Homo sapiens
  CDS (30)..(1568)
cagtctcaggccaagagctgcaggctggcatggctggggggatgtcagcagagtgccctgagcctgggccaggaggtctgcagggccagtccccagggccaggcaggcagtgtccccctcccatcacgcccacctcctggagcctgcccccgtggagggcctacgtggctgccgccgtcctctgctacatcaacctcctgaattacatgaactggttcatcattgcaggagtgctgctggatatacaggaggttttccagatcagtgacaaccatgctggtttgcttcagactgtcttcgttagctgcctgctgctgtctgcacctgtgtttggctacctgggcgaccgacatagccgcaaggctaccatgagcttcggtatcttgctgtggtcaggagctggcctctctagctccttcatctccccccggtattcttggctcttcttcctgtcccggggcatcgtgggcactggctcggccagctactccaccatcgcgcccaccgtcctgggcgacctcttcgtgagggaccagcgcacccgcgtgctggctgtcttctacatctttatccccgttggaagtggtctgggctacgtgctggggtcggctgtgacgatgctgactgggaactggcgctgggccctccgagtcatgccctgcctggaggccgtggccttgatcctgcttatcctgctggttccagacccaccccggggagctgccgagacacagggggagggggccgtgggaggcttcaggagcagctggtgtgaggacgtcagatacctggggaaaaactggagttttgtgtggtcgaccctcggagtgaccgccatggcctttgtgactggagccctggggttctgggcccccaagtttctgctcgaggcacgcgtggttcacgggctgcagcctccctgcttccaggagccgtgcagcaaccccgacagcctgatttttggggcactgaccatcatgaccggcgtcattggggtcatcttgggggcagaagctgcgaggaggtacaagaaagtcattccaggagctgagcccctcatctgcgcctccagcctgcttgccacagccccctgcctctacctggctctcgtcctggccccgaccaccctgctggcctcctatgtgttcctgggccttggggagctgcttctgtcctgcaactgggcagtggttgccgacatcctgctgtctgtggtggtgcccagatgccgggggacggcagaggcacttcagatcacggtgggccacatcctgggagacgctggcagcccctatctcacaggacttatctctagtgtcctgcgggccaggcgccctgactcctatctgcagcgcttccgcagcctgcagcagagcttcctgtgctgcgcctttgtcatcgccctggggggcggctgcttcctgctgactgcgctgtacctggagagagacgagacccgggcctggcagcctgtcacagggaccccagacagcaatgatgtggacagcaacgacctggagagacaaggcctactttcgggcgctggcgcctctacagaggagccctgaggtccctgcctacactcgtcctgcctgcaagcctcccgttggtccccacagcagcagtgcctcggttcctctttggctgtcctcggggactccggctgaggcacatctgctacttttgaattcccggctggagagctggcaggaccctgtggctgggctgggaatggagctgtcagcactctgcgtgggaggcctgggcctgtgcctgcatcccgctcaaggctgccccagcctggggtctccagcctggctgctgctgggccctgaataaagaga

SEQ ID NO: 43 - DNA, 3450 bp, Homo sapiens
  CDS (1)..(3450)
atgacgtccttagcccagcagctgcaacgactcgccctccctcaaagtgatgccagcctcttatctagagatgaagttgcttctttgttatttgaccctaaggaagcggccacaatcgacagggacaccgccttcgccattggatgtactggcctggaagagttgcttggaattgatccttcctttgagcagtttgaagcaccgttgttcagtcagctagcaaaaaccttggagcgaagtgttcagaccaaagcacaatctggagtgccgttagctaaaggaactttgattacccactgctacaaagatcttggattcatggatttcatttgcagtttggtgacaaaatctgtgaaggtttttgctgagtacccgggcagctcagctcagttgagggtgctcttggctttctatgcttctaccatagtgtcggcgctggtagctgcagaggacgtatcagacaatatcatcgccaaactatttccctatatccaaaagatcatcaaaacattgaccaagattccctctttgatcaaggatgggttaagttgcttgatagtgctcctgcagagacagaagccagagagccttgggaaaaagtacgaggtacttaagatagccgctgacatattaattaaagaagagatactgagtgaaaatgatcagttgtcaaatcaggtggttgtatgtttgctgccatttatggttatcaataatgatgatacggaatctgctgagatgaaaattgctatatatttatcaaaatcaggaatctgctccctgcaccctctattaagaggctgggaagaaggtgatatatggtggaatcctgaacaactgaaagaagacagcagggactatctgcacttgctcattgggctgtttgagatgatgctcaatggtgccgatgctgttcatttcagagttctgatgaaacttttcataaagatggtgctttctcagctattgcctatggctgaacaactgctagaaaagatccagaaggagcccacagctgtgctgaaagatgaggccatggttctgcatctcactctgggaaagtataatgaattttcagtttcccttttaaatgaggatccgaagagtctagatatatttataaaagctgtgcacacaacaaaggaactttacgcgggaatgccaaccattcagatcacagcccttgaaaagctgattagaatatacatatctgatccggcacttggaaacaatcgttgtctgctcaacatctgccaaaaactatctccagatggtggcaaaatacccaaagatattttagatgaggagaagttcaacgtggagttgatagttcagtgcatccgcctttcggagatgccgcagacccatcaccatgcccttttacttttgggcactgttgctggaatatttccggataaagttttacacaatatcatgtctatttttacatttatgggagccaatgtcatgcgcctagatgatacttacagttttcaagttattaacaagacagtgaaaatggttattcccgcacttattcagtctgatagtggagattctatagaagtttcaagaaacgttgaagagattgtggtaaaaatcattagtgtatttgtggatgcgctgccacacgtcccggagcacaggcgcctgcccatccttgttcaacttgttgatacactgggtgcagagaaattcctctggattctcctcatcttgctttttgaacagtatgtcacaaaaacagtgctggcggctgcctatggcgaaaaggatgctattttagaagcagacactgaattttggttttcagtctgttgtgagtttagtgtccagcatcagatacaaagcttgatgaatatcctccagtacttactaaagctgccagaggaaaaagaagctaaagagaaacagaagagaatgcaggttatccttagtacatcttcagaaggatttttaaagttgctggagaccgttctcggctatatcagtgcagttgcacagtccatggaaaggaacgcagacaaactcaccgtgaagttctggcgcgcgctccttagtaaagcttacgacctgttagataaggttacccgtttcctaaaactggttccagaccttttggccattgtgcagcgtaagaaaaaggaaggggaagaagaacaagcaatcaacagacagacagcattgtataccttaaagcttttatgcaagaattttggtgcagaaaatccagatccttttgtcccagtgctgaacactgctgtgaaactgattgctccagagagaaaggaggagaagaatgtcctgggaagcgcgctgctgtgcatagcagaggtgacctccaccctggaggcgctggccatcccccagcttcccagcctgatgccatcgttgctgacaacaatgaagaacaccagcgagctggtctccagcgaggtctacctgctcagtgccttggctgctctgcagaaggttgtggagactctcccgcacttcatcagcccctatctggaaggcattctctcccagaatcacatgggtccgtttatgagcatcttgcaagagcatattggggtgatgaagaaggaagagctcacctcccatcagtctcagctaaccgcctttttcctggaagccctggacttccgagcccagcactctgagaacgatctggaggaagttggaaaaacggaaaattgtatcattgactgtctagtagccatggttgtcaaactttccgaggtcacattcaggcccctgttcttcaagctgtttgattgggctaaaacagaagatgccccaaaggacaggttgttgacattttacaacttggcagattgcattgctgaaaagctgaaagggctttttactctgtttgccggccacttagtgaagccttttgctgacaccttgaaccaggtgaacatctccaaaacagatgaagcattttttgactctgaaaatgaccctgaaaagtgctgcttgctgttgcagtttattttgaactgtttatacaaaatcttcctttttgatacccagcattttataagtaaagagagagcagaagccttgatgatgcctctggtggatcagctggaaaacaggcttgggggagaagagaaattccaggaacgggtgacaaagcacctgataccatgcatcgcacagttttcggtggccatggcggatgactctctttggaaaccactgaactaccagattctgctaaagacgagagactcctcgcctaaggttcgatttgctgctttgattactgtgttagcactggctgaaaaactaaaggagaattatattgtcttgctaccagaatccattcctttcttagcagagttgatggaagatgaatgtgaagaagtagaacatcagtgccaaaagactattcagcaactggaaactgtcctgggagagccactccagagctatttctaa

SEQ ID NO: 44 - DNA, 1656 bp, Homo sapiens
  CDS (43)..(1542)
gaggctggcaggcaggagggctggggcgagcactggggggccatggagcgggcagaagagcccgtggtctatcagaagctgctgccctgggagccaagcttggagtcggaggaggaagtggaggaggaggagacatcagaggcgctggttctaaacccccggaggcaccaggactcttccaggaacaaggctggcgggctgcccggaacctgggcccgtgtagtggcagccctgctgctgctggctgttggctgctccctggctgtgaggcagctccagaatcagggcaggtcgacaggaagcttgggctctgtggcccctccacccggcggacactcccacggccctggcgtataccaccacggggccatcatcagccctgcacccacatgctcccacctaggccgagagctgcttgttgccgggggcaacgtcgtggatgctggagttggagctgcattgtgcctggcagtggtgcatcctcatgccacggggctaggtgccatgttttggggcctcttccacgatagctcctcaggcaattccacggccctgacatcaggcccagcacagaccctggcccccggcctggggctgcccgcggctctgcccaccctgcacctgctgcatgcacgcttcggccgcctgccctggccacgcctgctagtgggccccaccacgctggctcaggagggcttcctggtggacacacccctggcaagggctctggtggctcggggcacagaaggcctctgtccactactttgccatgctgatgggacacccctgggcgctggggcccgagccaccaacccacaactggcagctgtgcttcgcagcgcagccctcgctcccacctcagaccttgctggggatgctctactgagtctactggcgggagacctgggggtggaggtgccctcggctgtgcccaggcccactttggaaccagcagagcagctacctgtgccccagggcatcctgttcaccacccccagtccctcagctggcccagaactgctggcactgttggaggcagccctgcgctccggggcgcccatccctgacccctgcccaccgttcctgcagactgctgtgagccccgagagcagtgccctggccgccgtggacagcagcggctctgtgctccttctcacctcctcgctcaactgctcctttggctctgcacacctgtccccaagcactggggttctgctcagcaacctggtggccaagtctaccactagtgcctgggcctgccccctcatcctccgtggcagcctggatgacacagaggctgatgtgttggggcttgtggcttcagggacccctgatgtggccagggccatgactcacaccctactcaggcatctggcagcaaggccccctacccaggcccagcaccagcatcagggtcagcaagaaccaacagagcatcccagcacttgtggccaagggaccctgctccaggtggcagcccacacagagcacgcccatgtctccagtgtcccccatgcctgctgccccttccaggggttctaacaggatgggggtgggtctggcagaaggcagagttatctgaagcatgggggcaggagcagagcagacacagcagcaatggagtgtgcacccgcagggtgtggtgcctcactcctg

SEQ ID NO: 45 - DNA, 4659 bp, Homo sapiens
  CDS (1)..(4659)
atggggagcttgcagcaagcccttgtgtgctttgaaaagaggctcgtggttgctcatgaacttggagaggccttcaataaagcccaggcctatggagagctgggaagtctgcacagccaattagggaattacgaacaagccatttcctgccttgaacgccagctgaacattgctagagatatgaaagaccgagccctggagagtgacgcagcctgtggcctggggggcgtttaccagcagatgggggagtatgacacagccctgcagtaccaccagcttgatctacagatagcagaggaaaccaacaaccccacgtgccagggccgagcctatgggaacctgggcctgacttatgaatccctgggcaccttcgagagggctgtggtctatcaagaacagcacttgagcattgctgcacagatgaatgacttggcggccaagacggtgtcatatagtagccttggaaggacccatcatgccttgcagaactattcccaagcagtcatgtacttacaggaaggtttaaggttagctgagcaactgggccgaagagaagatgaggcaaaaattcgccatggccttggcctctccctttgggctagtggaaacttggaggaggcccaacaccagctttatagggcatcagccttgtttgaaacaatccgacatgaggcacagctgagcacggactacaaactctccctctttgacctgcagacatcatcctaccaggccttgcagcgggtgctcgtcagcctaggccatcatgatgaagccctggctgtggcagaaaggggacggacaagggcatttgctgatcttctggtggaacgacaaacaggacaacaagactccgacccctactccccagtcactattgatcagatcttagagatggtaaatggccagaggggactagtgctttactattccctggctgcaggctatctgtatagctggctgctggctcctggggcaggaattgtgaagtttcatgaacactacctgggtgagaacacagtggaaaactcaagtgacttccaggccagcagcagtgtaacccttccaacagcaaccggctcagccctggagcagcacattgccagtgtccgggaggccctgggggtggagtctcactactcaagggcctgtgccagcagtgagacagagagtgaagcgggagacatcatggaccagcaatttgaagagatgaacaacaaactcaactcggtcactgaccccactggctttctgcggatggttcgccgcaataacctgtttaacaggagctgccagagcatgacgagcctgttcagtaacactgtgtcaccgacccaggacgggacctcctctcttcccaggaggcagagctcgtttgccaagcccccgctccgtgccctgtatgacctgctcatcgcgcccatggaagggggcctgatgcactccagcggccccgtgggccggcaccggcagctcatcctggttctggagggggagctctacctcattcctttcgccctcctgaagggaagctcctccaatgagtacctctacgagcgcttcggcctccttgctgtcccttccatccgctccctcagcgtgcagtccaagtctcacttacggaagaacccgcccacatactccagctccacatccatggcggctgtcatcggcaaccccaagctaccatcggccgtgatggacaggtggctgtgggggcccatgccatcggccgaggaagaggcctacatggtgtccgagctgctgggctgccagcccctagtgggcagtgtggccaccaaggagagggtcatgagtgccctgacccaggctgaatgcgtccactttgccacccacatctcctggaagctgtcggccttggtcctcacgcccagcatggacggcaaccctgccagcagcaagagctccttcggccacccctacacgatccctgagtccttgcgggtgcaggacgatgccagtgatggggagagcatctcggactgcccgcccctgcaggagctgctgcttactgccgccgacgtcctggacctgcagctgcctgtgaagctggtggtgcttggctcctcccaggagtccaacagcaaagtcgcagccgacggggtcatcgcgctgacaagggccttcctggctgccggcgctcagtgtgtcctcgtgtctctgtggcctgtgccagtggctgcttttaagatgttcatccatgccttctactcatccctgctgaacggcctgaaagccagcgccgccctgggggaggccatgaaggtggtgcagagcagcaaggccttctcgcacccctccaactgggcagggttcatgctcatcgggagtgacgttaagctgaacagcccctcatcactcatcggccaggccctcacagagatcctgcagcacccggagcgtgcgcgggacgccctgcgagtgctgctgcacctggtggagaaatccctgcagcgcatccagaatgggcagcgcaatgccatgtacacatcccagcagagtgtggagaacaaagtgggcggcatccctggctggcaggccctcctcaccgctgtgggcttccggctggaccccccaaccagtggcctgccagcggctgtcttcttcccaacctccgacccgggcgaccggctccagcagtgcagcagcacactccagtccctgctgggtctgcccaatcctgccctccaagccctttgcaaactcatcactgcctccgagacgggcgagcagctcatcagccgggctgttaaaaatatggttggaatgctccaccaggtgctggttcagctccaggctggcgagaaggagcaggacttggcatcagctcccattcaggtctccatcagcgtccagctgtggcggctcccgggatgccacgagttcctggcagctctaggttttgatctctgtgaagttggtcaggaggaagtaatcctgaaaaccgggaagcaagctaatcgacggactgtgcacttcgcgctccagtccctgctgtctctgtttgattctactgagctacccaagcgcctcagccttgacagctcctcctccctcgagtctcttgcttctgctcagtctgtttccaacgccctgcccttgggttaccagcaaccccccttctctcccaccggtgcggacagcatcgcctcagatgccatctctgtgtacagtctgagctccattgcctcctcaatgagctttgtctccaaacccgagggtggatcagagggtggaggccccggaggacggcaggaccatgaccggtccaagaacgcttacctgcagagatccaccctgcctaggagccagctgcctccccagacccgccctgcaggcaacaaagatgaagaagaatatgaagggttttctatcatcagtaacgagcccttggcgacctaccaagaaaaccgaaacacatgcttctcaccagaccacaaacaaccccaacctgggacagccggaggcatgagagtctcggtgagctccaaagggagcatcagcactccaaattctccagtgaaaatgactctgattcccagccccaactcacccttccaaaaggtgggaaaactagcaagctcagatacaggagaatcagaccagtctagcacagaaacggacagtaccgtgaaatcccaagaagaaagcaacccaaaactggatccacaagagttagcccagaaaattctggaggagacacagagtcatctcattgcggtggagcgtcttcagaggagcggcggccaggtgagcaagagtaataaccctgaagacggcgttcaggcgcccagcagcactgctgtcttcagagcgtcagaaaccagtgcgttcagcaggcctgttctctcccatcagaagagtcagccatcaccagtcactgttaaaccaaagcccccagccaggagctcctccctgcccaaggtgagttccggatatagcagccccaccacctcagagatgtccatcaaagacagcccgagccagcacagtggccggccatcgcccggctgcgactcacagacttcccagctggaccagcctctctttaaactgaagtaccccagctctccttacagcgctcacatttccaaatcaccaaggaacatgtccccaagctccggccaccagtctcctgctggcagtgcaccctccccagctctctcctactcctcagctggatctgctcgctcaagtccagcagacgctcccgacatagacaaactgaaaatggcagccattgatgaaaaggtgcaggctgtccataacctgaagatgttctggcagagcacaccccagcattccacagggccaatgaagatcttccggggggctcctggcacgatgacttccaaaagggatgtcctcagtctgttgaatttgtcaccacggcacaataagaaggaggagggagtggataagcttgaactgaaggagctgtccctgcagcagcatgacggagctccaccgaaagcccctcccaacggacactggcgcaccgagaccacctcgctgggctcactgccgctgcccgccggccctcccgccacagcccccgcgcgccctttgaggcttccttctggaaatggctacaagttcctgtctccaggaagatttttcccttcttccaaatgctaa

SEQ ID NO: 46 - DNA, 1491 bp, Homo sapiens
  CDS (34)..(1491)
gcccgctgccgggcgcgggcctcagacaatacaatggtgggtgaagagaagatgtctctaagaaaccggctgtcaaagtccagggaaaatcctgaggaagatgaagaccagagaatccctgcaaaggagtccctagagacacctagtaatggtcgaattgacataaaacagttgatagcaaagaagataaagttgacagcagaggcagaggcaataaatagcagctctccaataaatgttgaatctgaatctagaagtagattccctgtcaaggaagtagaaataacaactcgaaaaaaaatcatgaaatcatttcaagaattgaagccattttttatgaaggaagttggcagtcactttgatgattttgtgaccaatctcattgaaaagtcagcatcattagataatggtgggtgcgctctcacaaccttttctgttcttgaaggagagaaaaacaaccatagagcgaaggatttgagagcacctccagaacaaggaaagatttttattgcaaggcgctctctcttagacacacttgtagtagattacattgatgaaggaaggctggtgcttgagttcagcctcctgtcttatgcttttggcaaatttcctaccgttgtttggacctggtggatcatgttcctgtctacattttcagttccctattttctgtttcaacattgggccactggctatagcaagagttctcatccgctgatccgttctctcttccatggctttcttttcatgatcttccagattggagttctaggttttggaccaacatatgttgtgttagcatatacactgccaccagcttcccggttcatcattatattcgagcagattcgttttgtaatgaaggcccactcatttgtcagagagaacgtgcctcgggtactaaattcagctaaggagaaatcaagcactgttccaatacctacagtcaaccagtatttgtacttcttatttgctcctacccttatctaccgtgacagctatcccaggaatcccactgtaagatggggttatgtcgctatgaagtttgcacaggattggtggaactccacgtcatactccaactattatagaacctggaatgtggtggtccatgactggctatattactatgcttacaaggactttctctggtttttctccaagagattcaaatctgctgccatgttagctgtctttgctgtatctgctgtagtacacgaatatgccttggctgtttgcttgagctttttctatcccgtgctcttcgtgctcttcatgttctttggaatggctttcaacttcattgtcaatgatagtcggaaaaagccgatttggaatgttctgatgtggacttctcttttcttgggcaatggagtcttactctgcttttattctcaagaatggtatgcacgtcagcactgtcctctgaaaaatcccacatttttggattatgtccggccacgttcctggacttgtcgttacgtgttttag

SEQ ID NO: 47 - DNA, 4008 bp, Homo sapiens
  CDS (1)..(4008)
atggagtccgaaatgctgcaatcgcctcttctgggcctgggggaggaagatgaggctgatcttacagactggaacctacctttggcttttatgaaaaagaggcactgtgagaaaattgaaggctccaaatccttagctcagagctggaggatgaaggatcggatgaagacagtcagtgttgccttagttttgtgcctgaatgttggtgtggaccctcccgatgtggtgaagaccacgccctgtgcacgcttggaatgctggatcgatcctctgtcgatgggtcctcagaaagctctggaaaccatcggtgcaaatttacagaagcagtacgagaactggcagccaagggcccggtacaagcagagccttgacccaactgtggatgaagtcaagaagctctgcacgtccttacgtcgcaacgccaaggaggagcgagtcctctttcactacaatggccacggggtgccccggcccacagtcaacggggaggtctgggtcttcaacaagaactacacgcagtacatccctctgtccatatatgacctgcagacgtggatgggcagcccgtcgatcttcgtctacgactgctccaatgctggcttgatcgtcaagtccttcaagcagttcgcactacagcgggagcaggagctggaggtagctgcaatcaacccaaatcaccctcttgctcagatgcctttgcctccgtcgatgaaaaactgcatccagctggcagcctgcgaggccaccgagctgctgcccatgatccccgacctcccggctgacctattcacctcctgcctcaccacccccatcaagatcgccctgcgctggttttgcatgcagaaatgtgtcagtctggtgcctggcgtcacactggatttgatagaaaagatccctggccgcctgaacgacaggaggacgcccctgggtgaactgaactggatcttcacagccatcacagacaccatcgcgtggaacgtgctcccccgggatctcttccaaaagctcttcagacaggacttgctggtggctagtctgtttcgaaattttttattggcggaaaggattatgaggtcgtataactgcactcccgtcagcagcccgcgtctgccgcccacgtacatgcacgccatgtggcaagcctgggacctggctgttgacatctgtctgtctcagctgccgacgatcatcgaggaaggcactgcgtttcggcacagcccgttcttcgccgagcagctgaccgcattccaggtgtggctcaccatgggcgtggagaaccgaaacccacccgaacagctgcccatcgtcctgcaggtgctgttaagccaagtgcaccggctgagagcattggacttgcttggaagatttttggacctgggtccctgggcagtgagcctggccttgtctgtcggcatcttcccctacgtgctgaagctgctccagagctcggcccgagagctgcggccacttctcgttttcatctgggccaagatcctcgcagtggacagctcgtgccaggcggacctcgtgaaggacaacggccacaagtacttcctgtcggtcctggcggacccctacatgccagctgaacaccggaccatgacggctttcattctcgccgtgatcgtcaacagctatcacacggggcaggaagcctgccttcagggaaacctcattgccatctgcctggagcagctcaacgacccgcaccccttgctgcgccagtgggtggccatctgcctcggcaggatctggcagaacttcgactcggcgaggtggtgcggcgtgagggacagcgctcatgagaagctctacagcctcctctccgaccccattcccgaggtccgctgcgcagcggtcttcgcccttggcacgttcgtgggcaactctgcagagaggacggaccactccaccaccatcgaccacaacgtggccatgatgctggcccagctggtcagcgacgggagccccatggtccggaaggagctggtggtggctctgagtcatcttgtggttcagtatgaaagcaatttctgcaccgtggccctgcagttcatagaagaggaaaagaactacgccttgccttctccagcaaccacagagggagggagtttgaccccagtgcgagacagcccgtgcacccccagacttcgttctgtgagctcctatggaaacatccgtgctgtcgccacagccaggagcctcaacaaatctttgcagaacctgagtttgacagaggaatctggtggcgcggtggcgttctcccccggaaacctcagcaccagcagcagcgccagcagcaccctgggcagccccgagaatgaggagcatatcctgtccttcgagaccatcgacaagatgcgccgcgccagctcctactcctccctcaactccctcatcggagtttcctttaacagtgtttacactcagatttggagagtcctgctgcacctggctgctgacccctatccagaggtctcggacgtggccatgaaagtactcaacagcatcgcctacaaggccaccgtgaacgcccggccgcagcgcgtcctggacacctcctccctcacgcagtcggcccccgccagccccaccaacaagggcgtgcacatccaccaggcggggggctcccctccggcgtccagcaccagcagctccagcctgaccaacgatgtggccaagcagccggtcagccgagacttgccttctggccggccgggcaccacaggccccgctggggcgcagtacacccctcactcccaccagttcccccggacacggaagatgttcgacaagggcccagagcagactgcggacgacgcggacgatgctgctggacacaaaagtttcatctccgccacggtgcagacggggttctgcgactggagcgcccgctattttgcccagcccgtcatgaagatcccagaagagcacgacctggagagtcagatccgcaaggagcgggagtggcggttcctgcgaaacagccgtgtcaggaggcaggcccagcaagtcattcagaagggcattacgagattggacgaccaaatatttctgaacaggaaccccggcgtcccctctgtggtgaaattccaccccttcacgccgtgcatcgccgtagccgacaaggacagcatctgcttttgggactgggagaaaggggagaagctggattatttccacaatgggaaccctcggtacacgagggtcactgccatggagtatctgaatggccaggactgctcgcttctgctgacggccacagacgatggtgccatcagggtctggaagaattttgctgatttggaaaagaacccagagatggtgaccgcgtggcaggggctctcggacatgctgccaacgacgcgaggagctgggatggtggtggactgggagcaggagaccggcctcctcatgagctcaggagacgtgcggatcgtccggatctgggacacagaccgtgagatgaaggtgcaggacatccctacgggcgcagacagctgtgtgacgagtctgtcctgtgattcccaccgctcactcatcgtggctggcctcggtgacggctccatccgcgtctacgacagaaggatggcactcagcgaatgccgcgtcatgacgtaccgggagcacacagcctgggtggtgaaggcctccctgcagaagcgtcccgacggccacatcgtgagtgtgagcgtcaatggagatgtgcgcatctttgatccccggatgcctgagtcggtaaatgtgcttcagatcgtgaaggggctgacggccctggacatccacccccaggcggacctgatcgcatgtggctccgtcaatcagttcaccgccatctacaacagcagcggagagctcatcaacaacatcaagtactacgacggcttcatgggccagcgggtcggcgccatcagctgcctggccttccacccgcactggcctcacctggccgtgggaagcaacgactactacatctccgtgtactcggtggagaagcgtgtcagatag

SEQ ID NO: 48 - DNA, 1743 bp, Homo sapiens
  CDS (16)..(1743)
atgagcttttcagaaatgatttacttacaaattccatatttgaatgcaggacagaatctggatagtatgcttcatggcactgggatgaaatcagactccgaccagaaaaagtcagaaaatggagtaaccttagcaccagaggataccttgccttttttaaagtgctattgctcagggcactgtccagatgatgctattaataacacatgcataactaatggacattgctttgccatcatagaagaagatgaccagggagaaaccacattagcttcagggtgtatgaaatatgaaggatctgattttcagtgcaaagattctccaaaagcccagctacgccggacaatagaatgttgtcggaccaatttatgtaaccagtatttgcaacccacactgccccctgttgtcataggtccgttttttgatggcagcattcgatggctggttttgctcatttctatggctgtctgcataattgctatgatcatcttctccagctgcttttgttacaaaggtcatctgctgttgcgtgttattcacattagaggacagttggaaagtgaggggggcgtgcctgttgtccttagacattattgcaagagcatctcaagcagacgtcgttacaatcgtgatttggaacaggatgaagcatttattccagttggagaatcactaaaagaccttattgaccagtcacaaagttctggtagtgggtctggactacctttattggttcagcgaactattgccaaacagattcagatggtccggcaagttggtaaaggccgatatggagaagtatggatgggcaaatggcgtggcgaaaaagtggcggtgaaagtattctttaccactgaagaagccagctggtttcgagaaacagaaatctaccaaactgtgctaatgcgccatgaaaacatacttggtttcatagcggcagacattaaaggtacaggttcctggactcagctctatttgattactgattaccatgaaaatggatctctctatgacttcctgaaatgtgctacactggacaccagagccctgcttaaattggcttattcagctgcctgtggtctgtgccacctgcacacagaaatttatggcacccaaggaaagcccgcaattgctcatcgagacctaaagagcaaaaacatcctcatcaagaaaaatgggagttgctgcattgctgacctgggccttgctgttaaattcaacagtgacacaaatgaagttgatgtgcccttgaataccagggtgggcaccaaacgctacatggctcccgaagtgctggacgaaagcctgaacaaaaaccacttccagccctacatcatggctgacatctacagcttcggcctaatcatttgggagatggctcgtcgttgtatcacaggagggatcgtggaagaataccaattgccatattacaacatggtaccgagtgatccgtcatacgaagatatgcgtgaggttgtgtgtgtcaaacgtttgcggccaattgtgtctaatcggtggaacagtgatgaagtgagtggaactcagtcccctgaagaagtgattcgtaaatgccaccaaatatattctctgctcactgaacatctctttacttttcagtgtctacgagcagttttgaagctaatgtcagaatgctgggcccacaatccagcctccagactcacagcattgagaattaagaagacgcttgccaagatggttgaatcccaagatgtaaaaatctga

SEQ ID NO: 49 - DNA, 1929 bp, Homo sapiens
  CDS (16)..(1929)
atgagcttttcagaaatgatttacttacaaattccatatttgaatgcaggacagaatctggatagtatgcttcatggcactgggatgaaatcagactccgaccagaaaaagtcagaaaatggagtaaccttagcaccagaggataccttgccttttttaaagtgctattgctcagggcactgtccagatgatgctattaataacacatgcataactaatggacattgctttgccatcatagaagaagatgaccagggagaaaccacattagcttcagggtgtatgaaatatgaaggatctgattttcagtgcaaagattctccaaaagcccagctacgccggacaatagaatgttgtcggaccaatttatgtaaccagtatttgcaacccacactgccccctgttgtcataggtccgttttttgatggcagcattcgatggctggttttgctcatttctatggctgtctgcataattgctatgatcatcttctccagctgcttttgttacaaaggtcatctgctgttgcgtgttattcacattagaggacagttggaaagtgaggggggcgtgcctgttgtccttaggatcctatgcccacaaggagagaggaaggtgtcatcttctcctcttcctcagcatcagaggatcttagcctggtcagagcacagggagcatttcctctacatccccaagaggcagagggactttgctgcttctcctccctccaaagtaatggatctttgcctgtgctctggggcagggggaagaggacattattgcaagagcatctcaagcagacgtcgttacaatcgtgatttggaacaggatgaagcatttattccagttggagaatcactaaaagaccttattgaccagtcacaaagttctggtagtgggtctggactacctttattggttcagcgaactattgccaaacagattcagatggtccggcaagttggtaaaggccgatatggagaagtatggatgggcaaatggcgtggcgaaaaagtggcggtgaaagtattctttaccactgaagaagccagctggtttcgagaaacagaaatctaccaaactgtgctaatgcgccatgaaaacatacttggtttcatagcggcagacattaaaggtacaggttcctggactcagctctatttgattactgattaccatgaaaatggatctctctatgacttcctgaaatgtgctacactggacaccagagccctgcttaaattggcttattcagctgcctgtggtctgtgccacctgcacacagaaatttatggcacccaaggaaagcccgcaattgctcatcgagacctaaagagcaaaaacatcctcatcaagaaaaatgggagttgctgcattgctgacctgggccttgctgttaaattcaacagtgacacaaatgaagttgatgtgcccttgaataccagggtgggcaccaaacgctacatggctcccgaagtgctggacgaaagcctgaacaaaaaccacttccagccctacatcatggctgacatctacagcttcggcctaatcatttgggagatggctcgtcgttgtatcacaggagggatcgtggaagaataccaattgccatattacaacatggtaccgagtgatccgtcatacgaagatatgcgtgaggttgtgtgtgtcaaacgtttgcggccaattgtgtctaatcggtggaacagtgatgaagtgagtggaactcagtcccctgaagaagtgattcgtaaatgccaccaaatatattctctgctcactgaacatctctttacttttcagtgtctacgagcagttttgaagctaatgtcagaatgctgggcccacaatccagcctccagactcacagcattgagaattaagaagacgcttgccaagatggttgaatcccaagatgtaaaaatctga

SEQ ID NO: 50 - DNA, 1602 bp, Homo sapiens
  CDS (1)..(1602)
atgtaccagcccaacactctggatcccatctttggcatgatgtttgaactcacctgcaacatacccctggagaaggacctagagatccagctctatgacttcgacctattttcacctgatgataagataggaaccacagtcatcgaccttgaaaaccgactcctatctggctttggagctcattgtgggctctccaaatcctactgccagtcagggccctttagatggcgggatcagatgcccccaagctacctcctagaacgctatgccaagcggaaagggctacctccgcctctgttcagtcctgaggaagatgctgttttctataatgggaaaaagttcaagctgcaaagctttgagcccaaaacccctactgtccatggtttgggacccaagaaggaacgccttgcactgtacctcctgcacacccaggggctggtacctgagcacgtggagacccgcacactgtacagccacagccagccaggcatcgaccagggaaaggtgcaaatgtgggtggacatcttccccaagaagctggggcctcctggcccccaagtcaacatcaaccccagaaagcctaaacggtatgagctgcgatgcatcatctggaagactgccaatgtggacctggtggatgacaatttaagtagagagaagacgagcgacatctacatcaaagggtggttatacgggctggagaaggacatgcagaagacagacatccactaccactcgctgactggggaggccgacttcaactggcggttcatctttaccatggactacctggcggcggagcgcacgtgtgtccagagccagaaggattacatatggagcctggatgccacgtccatgaagttcccagcccgacttatcatccaggtctgggacaatgacatcttctcccccgacgacttcctaggggtcctggagctggatttgtctgacatgcccctcccggctcggcacgccaagcagtgctccatcaggatgatggacgccgaccccaagtggccctatttcatccaatacaagcacttctccctctttaagaagaagactgtgactggctggtggccttgccaggtcctcgatggtggcaaatggcgcttgtcgggcaaggtgaagatgagcctggagattctgtcagagaaggaagccttaatcaagccagccgggcgaggccagtcggaacccaaccagtaccccacacttcatcctcccctacgcaccaacacctctttcacgtggctgcggtcaccagttcaaaacttctgctatattttctggaaacgctatcgcttcaaactcatagcctttatggtcatatcgattatagcacttatgctgtttaacttcatctattcagctccgcactatttggccatgagctggatcaaacctcaacttcagctgtatcctcccattaaaatattcaatatcatcaattcactaaacaccagcaacgccagctcttccatccttcccacccaggatccaaacctaaagcctacaatagaccatgagtggaaactccacccaggacccacaaatcacctgagtgatattttcccagaacttccagccccaggagactaa

SEQ ID NO: 51 - DNA, 5677 bp, Homo sapiens
  CDS (3269)..(5677)
gatctctcccatgaagtgaccaggatagagaagcaccagaaccgccaaaagtatgggctgtgcgtcatcttcctttcctgtaccatgatgcccaactttaaagagctgatccatttcgaggtcagcatcggtcactatgggaacaagatggacctgaattacaagcctctagtctcaagcacaccgtacagcccagtgatatatgatgggaacatctaccattatgtgccctggtacaacaccaagcctgtcgtggccgtgacctccaactgggaggacgtcagcttccgcatgaactgcctcaacctcctccacttcactcgggaccgcctgaaagccaacctggacaccctgaaatccacgcggaatccgaaggatccagctctcctctaccagtgggagaaactgctgagggagctggcagaggactgcaagcgccctctgccctgcatgacctatcagcccaaagccaccagcctggacaggaagaggtggcagctccgcagcctcctcctgcaggaactggcccaaaaggccaagcaagccaagcccaaggacatggtggccacagcggaggactggctgtaccgcctcaacgccgtgctccctgagccccagatgggcctccctgacgtgatgatttggctggtggccaaggagcagcgagtggcctatgcacagtacccagagggtgaaggacagaaggatgtgctcccagctcacctccgggtctgcatgtggcttggcaatgtcacagacagcaaggacctgcagctgctccgccagggtgacacagcggtgtacgccgagatggtgagtgtatgagaatcaggccaagtataaagaccagtgggggcagcaggggctgtatcactgccccaacttctcggatgtcatggggaacaagaccctccccatgacggatttccaaccacccctgggatggcactggcaggacagctggacagtggaacctcagagaaggctcctcctggacatagacatcaacaagagccaggtgctggaggaggtatatgagaaccagggccgtgacaccagaggggcctgggggcctgccgccatcccaaacacagacgtgaatggacagcccatggaggcccgggagaacgtgaagtgcccccaaggctggcactttaagaaggactgggtggtggagctgaaccacgcagtggacagtaagggctgggagtatggagtggggatcccaccgtcgggcctgccccaggtctggagcccggtggagaagacctaccactcgtgccgccgccggcgctgggcgcgtgtgcgcttcaggaaccatggggagctgagccacgagcaggagaccctctccttcctgcagctgggcctggccaagggcgaggaggagggctgggagtatgacaccttcggctccaagttccacctcaaccctcagccccagagccggttccgccgccgctgctggcgccgcaggctggcccccaacaaggacaagggcatcgcgcccatattcctcctggaggggtccttggctatggatctgaaataccacgctgggaaggaagaggacagcaagacatggccatggggtctggacagacagttcagggacccccagaggcaggacacccggccccccaacttgcccttcatctactgcaccttcaataagccccactactaccagctcttctgctacatctaccaggcccggaacctggtgtccaatcagatcctgacattccaagggcccttcattcgggtggtcttcctgaaccacagccagtgcacccaaaccctgaggagctctgcaggccccacatgggcccagacactcatcttccagcacctccttctgtacgagaacccgcaggacaccaaagagagcccaccgcttgtggtgctggagctgtggcagcgtgacttctggggcaaggagagcttgtggggacggagcgtgtggcccccaatggtctggctggatctccaggaccggatcctgccccccatgaggtggcatccccttgtaaaggagttggggaaggaagagggcgagatcttggcatcctgtgagctgatcctccagactgagaagcttggagagaagcagctgcctatcttaagcgttccctggaagaatggggcatacacactccccaagagcatccagcccacgataaagaggatggccattgaggtgctggcgatgtgggatggggacggtgggcaggacaggcgggggtggtctggagtgcgctgcagccttctgctggtcctccctgactactggatccaaagctcacaccccgaaaaagactacctgggaggtggagggagacaggagagaaacgaagaggttctggtgtaacactggaaatcattttaccacaaacctctgcagtgaggagtaggcaaagggctgtagcatgcatgatcacttgtgggactcacgctgcccctgcgcagtagcaactactttgcagagaaggaaatagaggctccaagagataacacattccacgcacagtgatgcagggactaactgacagggccatttaggcccagccctgtctgactgcagatgccaggatgttgctcacctctcttctgagagtagcatgagggtcctcattcagaagctgtgtgccctgccgcaaatgtggcaaagagcacaagacggtcaggcctctgggactgaaggcttccccaagatcaggcaacttggctggttcccgctttaggccccgaggaggcccaaagtcagggtgcagctatttcctggcaggatgccaggtcactgaatggccatggggtcctcaatgagctagacggcacaggggccctgagaaatccaggcacttcctgcttcttcaggcctcagaggcagtcggcttcaggaactcctacctgagaactgatgaggccagacaaggcagcgggtgaggaggggcaatgcctgcgggctatggaggtcagtggaggatgcagccagtggccagaggtcacctccctcatgggttgggggacagcgtcccagccccgagggcaagcactgatccctcacaggacggggaagcctgtccttgtgcgccttcagacactggctcctctgcagccccattccctggccctgcaggctcctgctgcaccgctattgcccctcagcccccttctctggccaggaccccattacagaggcgctgcctgccccttgtcctgccctccttctttgttctggtagatcctggcctggggccttcggaacatgaagaaggcgagctccccccagctcctggtggaattcggggaagagtccctgaggacagaacccatcagggactttcagaccaaccccaacttccccgagtctgagtctgtcctagtcctcacagtgctcatgccgacggaggaggcctatgcactgcccctcgtggtgaaggtggtagacaactgggccttcggccagcagaccgtgacgggccaggccaacatcgacttcctccagccctacttctgtgacccctgggctcaagactatatgcacccaaagcttccaacgctgtctgagaagaagcaccaagacttcctaggctacctctacagaaagttctggttcaagtccagtaaagcagaggatgagtatgagcatgaggtggactggtggagcaagctgttctgggccacagatgagcacaagtccctgaagtacaagtacaaagactaccacaccctcaaggtgtatgagtgtgagctggaggccgtgccagccttccagggcctgcaggacttctgccagaccttcaaactctaccaggagcagcccaagttggacagccccgtggtaggggagttcaagggccttttccgcatctacccctttcctgagaatccagaagccccaaagcccccgctgcagttcttggtttggccagagagagaggacttcccccagccgtgcttggtgcgggtgtacatggtacgagccatcaacctgcagccccaggactacaatggcctgtgtgacccttatgtgatcctgaaactgggcaagacagagcttggcaaccgggacatgtaccagcccaacactctggatcccatctttggcatgatgtttgaactcacctgcaacatacccctggagaaggacctagagatccagctctatgacttcgacctattttcacctgatgataagataggaaccacagtcatcgaccttgaaaaccgactcctatctggctttggagctcattgtgggctctccaaatcctactgccagtcagggccctttagatggcgggatcagatgcccccaagctacctcctagaacgctatgccaagcggaaagggctacctccgcctctgttcagtcctgaggaagatgctgttttctataatgggaaaaagttcaagctgcaaagctttgagcccaaaacccctactgtccatggtttgggacccaagaaggaacgccttgcactgtacctcctgcacacccaggggctggtacctgagcacgtggagacccgcacactgtacagccacagccagccaggcatcgaccagggaaaggtgcaaatgtgggtggacatcttccccaagaagctggggcctcctggcccccaagtcaacatcaaccccagaaagcctaaacggtatgagctgcgatgcatcatctggaagactgccaatgtggacctggtggatgacaatttaagtagagagaagacgagcgacatctacatcaaagggtggttatacgggctggagaaggacatgcagaagacagacatccactaccactcgctgactggggaggccgacttcaactggcggttcatctttaccatggactacctggcggcggagcgcacgtgtgtccagagccagaaggattacatatggagcctggatgccacgtccatgaagttcccagcccgacttatcatccaggtctgggacaatgacatcttctcccccgacgacttcctaggggtcctggagctggatttgtctgacatgcccctcccggctcggcacgccaagcagtgctccatcaggatgatggacgccgaccccaagtggccctatttcatccaatacaagcacttctccctctttaagaagaagactgtgactggctggtggccttgccaggtcctcgatggtggcaaatggcgcttgtcgggcaaggtgaagatgagcctggagattctgtcagagaaggaagccttaatcaagccagccgggcgaggccagtcggaacccaaccagtaccccacacttcatcctcccctacgcaccaacacctctttcacgtggctgcggtcaccagttcaaaacttctgctatattttctggaaacgctatcgcttcaaactcatagcctttatggtcatatcgattatagcacttatgctgtttaacttcatctattcagctccgcactatttggccatgagctggatcaaacctcaacttcagctgtatcctcccattaaaatattcaatatcatcaattcactaaacaccagcaacgccagctcttccatccttcccacccaggatccaaacctaaagcctacaatagaccatgagtggaaactccacccaggacccacaaatcacctgagtgatattttcccagaacttccagccccaggagactaa

SEQ ID NO: 52 - DNA, 4841 bp, Homo sapiens
  CDS (66)..(3689)
tgattttccaaaaaaaaaaaaaggttttttaatggagaagtaattcacatgccgtaaaattctccatgttaaagtttgcagctcggtgcttgacaggctattcacaaagccgtgcgtcactgcccaccactctctcattcaaggacactttcatcataaaaggtggcgttgaagaccttgagccggacgcctcctgctggcccctccgagtgctctccctgccctggggggctgtcctggggggggagcgagggcacgcggataagtccctaaggttccccgggtggaggcaccagcaggagagcgggggaggcagagggcccaccatgcctgcaactcccaacttcctcgcaaaccccagctccagcagccgctggattcccctccagccaatgcccgtggcctgggcctttgtgcagaagacctcggccctcctgtggctgctgcttctaggcacctccctgtcccctgcgtggggacaggccaagattcctctggaaacagtgaagctatgggctgacaccttcggcggggacctgtataacactgtgaccaaatactcaggctctctcttgctgcagaagaagtacaaggatgtggagtccagtctgaagatcgaggaggtggatggcttggagctggtgaggaagttctcagaggacatggagaacatgctgcggaggaaagtcgaggcggtccagaatctggtggaagctgccgaggaggccgacctgaaccacgaattcaatgaatccctggtgttcgactattacaactcggtcctgatcaacgagagggacgagaagggcaacttcgtggagctgggcgccgagttcctcctggagtccaatgctcacttcagcaacctgccggtgaacacctccatcagcagcgtgcagctgcccaccaacgtgtacaacaaagacccagatattttaaatggagtctacatgtctgaagccttgaatgctgtcttcgtggagaacttccagagagacccaacgttgacctggcaatattttggcagtgcaactggattcttcaggatctatccaggtataaaatggacacctgatgagaatggagtcattacttttgactgccgaaaccgcggctggtacattcaagctgctacttctcccaaggacatagtgattttggtggacgtgagcggcagtatgaaggggctgaggatgactattgccaagcacaccatcaccaccatcttggacaccctgggggagaatgacttcattaatatcatagcgtacaatgactacgtccattacatcgagccttgttttaaagggatcctcgtccaggcggaccgagacaatcgagagcatttcaaactgctggtggaggagttgatggtcaaaggtgtgggggtcgtggaccaagccctgagagaagccttccagatcctgaagcagttccaagaggccaagcaaggaagcctctgcaaccaggccatcatgctcatcagcgacggcgccgtggaggactacgagccggtgtttgagaagtataactggccagactgtaaggtccgagttttcacttacctcattgggagagaagtgtcttttgctgaccgcatgaagtggattgcatgcaacaacaaaggctactacacgcagatctcaacgctggcggacacccaggagaacgtgatggaatacctgcacgtgctcagccgccccatggtcatcaaccacgaccacgacatcatctggacagaggcctacatggacagcaagctcctcagctcgcaggctcagagcctgacactgctcaccactgtggccatgccagtcttcagcaagaagaacgaaacgcgatcccatggcattctcctgggtgtggtgggctcagatgtggccctgagagagctgatgaagctggcgccccggtacaagcttggagtgcacggatacgcctttctgaacaccaacaatggctacatcctctcccatcccgacctccggcccctgtacagagaggggaagaaactaaaacccaaacctaactacaacagtgtggatctctccgaagtggagtgggaagaccaggctgaatctctgagaacagccatgatcaatagggaaacaggtactctctcgatggatgtgaaggttccgatggataaagggaagcgagttcttttcctgaccaatgactacttcttcacggacatcagcgacacccctttcagtttgggggtggtgctgtcccggggccacggagaatacatccttctggggaacacgtctgtggaagaaggcctgcatgacttgcttcacccagacctggccctggccggtgactggatctactgcatcacagatattgacccagaccaccggaagctcagccagctagaggccatgatccgcttcctcaccaggaaggacccagacctggagtgtgacgaggagctggtccgggaggtgctgtttgacgcggtggtgacagcccccatggaagcctactggacagcgctggccctcaacatgtccgaggagtctgaacacgtggtggacatggccttcctgggcacccgggctggcctcctgagaagcagcttgttcgtgggctccgagaaggtctccgacaggaagttcctgacacctgaggacgaggccagcgtgttcaccctggaccgcttcccgctgtggtaccgccaggcctcagagcatcctgctggcagcttcgtcttcaacctccgctgggcagaaggaccagaaagtgcgggtgaacccatggtggtgacggcaagcacagctgtggcggtgaccgtggacaagaggacagccattgctgcagccgcgggcgtccaaatgaagctggaattcctccagcgcaaattctgggcggcaacgcggcagtgcagcactgtggatgggccgtgcacacagagctgcgaggacagtgatctggactgcttcgtcatcgacaacaacgggttcattctgatctccaagaggtcccgagagacgggaagatttctgggggaggtggatggtgctgtcctgacccagctgctcagcatgggggtgttcagccaagtgactatgtatgactatcaggccatgtgcaaaccctcgagtcaccaccacagtgcagcccagcccctggtcagcccaatttctgccttcttgacggcgaccaggtggctgctgcaggagctggtgctgttcctgctggagtggagtgtctggggctcctggtacgacagaggggccgaggccaaaagtgtcttccatcactcccacaaacacaagaagcaggacccgctgcagccctgcgacacggagtaccccgtgttcgtgtaccagccggccatccgggaggccaacgggatcgtggagtgcgggccctgccagaaggtatttgtggtgcagcagattcccaacagtaacctcctcctcctggtgacagaccccacctgtgactgcagcatcttcccaccagtgctgcaggaggcgacagaagtcaaatataatgcctctgtcaaatgtgaccggatgcgctcccagaagctccgccggcgaccagactcctgccacgccttccatccagaggagaatgcccaggactgcggcggcgcctcggacacctcagcctcgccgcccctactcctgctgcctgtgtgtgcctgggggctactgccccaactcctgcggtgacaccacccagcctgacctgtgttttggcaaggtgatccttccagagccatcccaaaaagtcagcactgacatgggatgcagctaactgcagttgggtcgcccccaggccaacgctcctctcaatcctgggctggtggcccctggctccggagaatgctggatggaacaggaaaccaatcacctggcaccactttcaagatgcttcatggtgcccggtaccatctgccctaggtctcaacatgagcatacttctgacctaaccttcctgtctcctcttcgggaagccagcgtgagctcagcttggaccaagacaaaataatttagttcttcctgtactccagagtccagacccagccaagaaagggtcagttgtttctgaccctttctgtcggagtggtctctggtagaacccaaggacttctgggtactgagaagcagcagcagaatgaggccaaatgcagagatgaggctaaggcaagaatatgccccaactaaagcatagattccccaaagtgagtctcatggtgggaggccactcaccttcctagctgctgctcgaaaaggttttgactgtgttggggtgggggttgggtaagggaatggtcaagactgagaaaggaatgaaatccattcaggaaatatcgacagggctacacgtgatgtccccaaactgctgctattgaagaacttcccaaaacttctttacaaagccctaaaggaaagtttgcatctatgaaaagccaataggctgagacatccaattgctgcatggaaattgatgtacattcaggggacggcaaaaatagctgtaaaatagtgaaaaagagcagtggttgtgctcttttctggccaatgatttacaaaagaatctacttgactctgtccctggagtgaaatccttagggttggaacttgtgggaacattccaacttgctaagcagggtccactgggagggaagctctatctgggaactcacccccagcgcacacacatctcccccagggtcccaaggccccgcagcttcctcccccgaccaaaccccaagacctggatcccaggagacaacagtctccacagtgagagcaacattaagggcaaagccatggagaaatgtgggagaggccggcctcaaatctttccatttaacaaac

SEQ ID NO: 53 - DNA, 2028 bp, Homo sapiens
  CDS (1)..(2028)
atgggcatttatggttcagtaccttatctcctggcccacaaactgggcagaactataggtattttctggctgaatgcctcggaaacactggtggagatcaatacagagcctgcagtagagtacacactgacccagatgggcccagttgctgctaaacaaaaggtcagatctcgcactcatgtgcactggatgtcagagagtggcatcattgatgtttttctgctgacaggacctacaccttctgatgtcttcaaacagtactcacaccttacaggtatttgcacgaagaagtgccagtttcttgttctgttacatatccaatgtcccatgtgtcatcacggcacacaagccatgccccctcttttctctttgggataccaccagtgccgctggaactatgaagatgagcaggatgtaaaagcagtggatgcagggtttgatgagcatgacattccttatgatgccatgtggctggacatagagcacactgagggcaagaggtacttcacctgggacaaaaacagattcccaaaccccaagaggatgcaagagctgctcaggagcaaaaagcgtaagcttgtggtcatcagtgatccccacatcaagattgatcctgactactcagtatatgtgaaggccaaagatcagggcttctttgtgaagaatcaggaaggggaagactttgaaggggtgtgttggccaggtctctcctcttacctggatttcaccaatcccaaggtcagagagtggtattcaagtctttttgctttccctgtttatcagggatctacggacatcctcttcctttggaatgacatgaatgagccttctgtctttagagggccagagcaaaccatgcagaagaatgccattcatcatggcaattgggagcacagagagctccacaacatctacggtttttatcatcaaatggctactgcagaaggactgataaaacgatctaaagggaaggagagaccctttgttcttacacgttctttctttgctggatcacaaaagtatggtgccgtgtggacaggcgacaacacagcagaatggagcaacttgaaaatttctatcccaatgttactcactctcagcattactgggatctctttttgcggagctgacataggcgggttcattgggaatccagagacagagctgctagtgcgttggtaccaggctggagcctaccagcccttcttccgtggccatgccaccatgaacaccaagcgacgagagccctggctctttggggaggaacacacccgactcatccgagaagccatcagagagcgctatggcctcctgccatattggtattctctgttctaccatgcacacgtggcttcccaacctgtcatgaggcctctgtgggtagagttccctgatgaactaaagacttttgatatggaagatgaatacatgctggggagtgcattattggttcatccagtcacagaaccaaaagccaccacagttgatgtgtttcttccaggatcaaatgaggtctggtatgactataagacatttgctcattgggaaggagggtgtactgtaaagatcccagtagccttggacactattccagtgtttcagcgaggtggaagtgtgataccaataaagacaactgtaggaaaatccacaggctggatgactgaatcctcctatggactccgggttgctctaagcactaagggttcttcagtgggtgagttatatcttgatgatggccattcattccaatacctccaccagaagcaatttttgcacaggaagttttcattctgttccagtgttctgatcaatagttctgctgaccagaggggtcattatcccagcaagtgtgtggtggagaagatcttggtcttaggcttcaggaaggagccatcttctgtgactacccactcatctgatggtaaagatcagcctgtggcttttacgtattgtgccaaaacatccatcctgagcctggagaagctctcactcaacattgccactgactgggaggtccgcatcatatga

SEQ ID NO: 54 - DNA, 252 bp, Homo sapiens
  CDS (1)..(252)
atggacgccgttaaacatcctacagtgcaagcgcagcccccgaccacgaagagttgtcttgctcaaatatcaacagtgctgcagtgtagaaacttgatcgttggttttcttttaatgcaaaactctcataaaaacctttcacttttcctgtcattgattatatgcttgatacacccaaaaagaaaaggggaggggcaccaattcacctacactccagtggctccatcacctttaaaaatatttataaaatag

SEQ ID NO: 55 - DNA, 3585 bp, Homo sapiens
  CDS (51)..(2582)
gagcggtgcgagggaaaccctgcactctgagctggattgggtcgcgtgcgatgtgcgggctcctggcagaccctggggttccgctgctcgttgccatggctcccgccggagcggccagagcgggcgtcgggttgggtgtcagcggtattccgggcccggttctccacccaggcctggacctggaccctcgggcactgcagcgtccgtctgtaggtttccaggcagaggaaatcctgagacatccaggcgcagctgggagttgctacctggctccatccgtgagcacagcgaggtgctgtctttcatgcttatctgtcttcctcttgaattcagattcccaacctgctgagcatccgcacacccactcaggagttggggcccagctcccagtttacttggtttcccttgtgcagcctggggctctgcccaggccaccacaggcaggggtcgacatggcagagacactggagttcaacgacgtctatcaggaggtgaaaggttccatgaatgatggtcgactgaggttgagccgtcagggcatcatcttcaagaatagcaagacaggcaaagtggacaacatccaggctggggagttaacagaaggtatctggcgccgtgttgctctgggccatggacttaaactgcttacaaagaatggccatgtctacaagtatgatggcttccgagaatcggagtttgagaaactctctgatttcttcaaaactcactatcgccttgagctaatggagaaggacctttgtgtgaagggctggaactgggggacagtgaaatttggtgggcagctgctttcctttgacattggtgaccagccagtctttgagatacccctcagcaatgtgtcccagtgcaccacaggcaagaatgaggtgacactggaattccaccaaaacgatgacgcagaggtgtctctcatggaggtgcgcttctacgtcccacccacccaggaggatggtgtggaccctgttgaggcctttgcccagaatgtgttgtcaaaggcggatgtaatccaggccacgggagatgccatctgcatcttccgggagctgcagtgtctgactcctcgtggtcgttatgacattcggatctaccccacctttctgcacctgcatggcaagacctttgactacaagatcccctacaccacagtactgcgtctgtttttgttaccccacaaggaccagcgccagatgttctttgtgatcagcctggatcccccaatcaagcaaggccaaactcgctaccacttcctgatcctcctcttctccaaggacgaggacatttcgttgactctgaacatgaacgaggaagaagtggagaagcgctttgagggtcggctcaccaagaacatgtcaggatccctctatgagatggtcagccgggtcatgaaagcactggtaaaccgcaagatcacagtgccaggcaacttccaagggcactcaggggcccagtgcattacctgttcctacaaggcaagctcaggactgctctacccgctggagcggggcttcatctacgtccacaagccacctgtgcacatccgcttcgatgagatctcctttgtcaactttgctcgtggtaccactactactcgttcctttgactttgaaattgagaccaagcagggcactcagtataccttcagcagcattgagagggaggagtacgggaaactgtttgattttgtcaacgcgaaaaagctcaacatcaaaaaccgaggattgaaagagggcatgaacccaagctacgatgaatatgctgactctgatgaggaccagcatgatgcctacttggagaggatgaaggaggaaggcaagatccgggaggagaatgccaatgacagcagcgatgactcaggagaagaaaccgatgagtcattcaacccaggtgaagaggaggaagatgtggcagaggagtttgacagcaacgcctctgccagctcctccagtaatgagggtgacagtgaccgggatgagaagaagcggaaacagctcaaaaaggccaagatggccaaggaccgcaagagccgcaagaagcctgtggaggtgaagaagggcaaagaccccaatgcccccaagaggcccatgtctgcatacatgctgtggctcaatgccagccgagagaagatcaagtcagaccatcctggcatcagcatcacggatctttccaagaaggcaggcgagatctggaagggaatgtccaaagagaagaaagaggagtgggatcgcaaggctgaggatgccaggagggactatgaaaaagccatgaaagaatatgaagggggccgaggcgagtcttctaagagggacaagtcaaagaagaagaagaaagtaaaggtaaagatggaaaagaaatccacgccctctaggggctcatcatccaagtcgtcctcaaggcagctaagcgagagcttcaagagcaaagagtttgtgtctagtgatgagagctcttcgggagagaacaagagcaaaaagaagaggaggaggagcgaggactctgaagaagaagaactagccagtactccccccagctcagaggactcagcgtcaggatccgatgagtagaaacggaggaaggttctctttgcgcttgccttctcacaccccccgactccccacccatattttggtaccagtttctcctcatgaaatgcagtccctggattctgtgccatctgaacatgctctcctgttggtgtgtatgtcactagggcagtggggagacgtcttaactctgctgcttcccaaggatggctgtttataatttggggagagatagggtgggaggcagggcaatgcaggatccaaatcctcatcttactttcccgaccttaaggatgtagctgctgcttgtcctgttcaagttgctggagcaggggtcatgtgaggccaggcctgtagctcctacctggggcctatttctactttcattttgtatttctggtctgtgaaaatgatttaataaaggggaacgtgatctttgtgcaaaatgataaatgaaagtaggatgcatgaattgagcaatttttggggcggggttgatgtttcccctgaaaatagcgtgtatcaaagtgacctggcagacgatagaggaggtgacgaggagcccccacgacaggttggaaggagacgaccagtgccgcagagagggcagtgtcccgctggtggtgaagacctccggggactcgggcacctgagggtgcttggtgtatgtttgcctcgccagaaatatataaagacccaggtggggggggtgaagcaaacacgcgctgtgggcttgaggaaagcaaaaaccacgcaattggagaggacacgttcccgaaggggagagaacttcgattcgcgggggacccgccacgcaaataactggggattggcgccagaatgggtccaccgttaaaaatcctaattgataaggcgtcccgggggccgtgattgtggtggatttgagcccggcacaaggttggaaaggaccttttggttaccagcaattgctgtttcaaacttttctttgtaccaaaaatttgtttactttggccttttttccttttgtttgtaacttatcttg

SEQ ID NO: 56 - DNA, 2061 bp, Homo sapiens
  CDS (1)..(2061)
atggccataggcctgctgatggctcaggaaggccattgcaaggactcctcagctatgggagaggaagcacatcacccattgacccccgcaacccctccctttcctcccctgagtcccgactggggccacatgcagcctgacttctttgtgcctgttgctgtccctgcagtcttcagagggccaccgcagctccagtgccacggcaggaggctgttcctgaatagcccctgtgcccagaaatcttcctctggcctagttgtggagcctggcctaagtcgcacattgctggagatggtgaagctgaccagcatgagaggtcagtttctagaagcccaaatcccaacaggcataagcctcaccctccaatatcagctctatcagaaacaaacaaacaaaaacatgtcttattcatttgtccttttcctcaaatgggtggcacttgggcagggcagaagggctggttatccaagcttggaagatgctgacagcagacgcttcaatggcagtaggagttttctgatcactgtcattggtatcacgcttactgttgaaatcgtgacatcaggaatgatgaaaggaactagagtcagatggtctggagcggggaatgaggggatgatggggctggaagagggaaggaatgaaaggagtgtgaaggaagcgccaccaaggagagctgtggaagcccaacccaaagaccgcacctgggatgtcgggaagggccaaggtacagaaggagaaggaagagggttggaggtggagggccagcagcaccaaggctcggagccagggacaataccattctctgtctcatggggcgtcctcctgctggcaggcctgtgctgcctggtccccagctccctggttgaggatccccaggaagatgctgcccaaaagacggatacatcccaccatgatcaaggggactgggaggaccttgcttgccagaagatctcctataacgtcaccgacctcgcctttgatttgtacaaagagctggctgatctatcacaaaccagcaatgtcttagtcaccccaacaagcgtggctatggcctttgcaatgctctccctggggaccaaggctgacactcgcacagagatcctggaaggcctgaatgtcaacctcacagagacgcctgaggccaagatccacgaatgcttccagcaagttctccaagccctcagcaggccagacacccggctccagctgaccaccggcagtagcctgtttgttaacaagagtatgaagctagtggacacgtttttggaggataccaagaagctgtaccactcagaagcctcttccatcaacttcagggacaccgaggaggccaaagagcagatcaacaattatgtggagaaaagaactggaagaaaagtagtggatttggtcaaacacctgaaaaaagacacaagtcttgccctggtggattacatttcctttcacggcaagtggaaagataaattcaaggctgagcgcattatggtagagggcttccatgtggatgataagaccatcatcagagtgcctatgataaaccacctgggtagatttgacatccaccgggacagggagttatccagctgggtgctggcacagcactatgtggggaacgccactgccttcttcatcctgcccgatccaaagaagatgtggcagttggaagaaaaattgacctacagccaccttgaaaatatccagagagcctttgacataaggtctatcaatctacattttcccaaactgtccatttctggaacctacaaactcaagagagtccctaggaatctgggcatcactaagatcttcagcaatggggctgacctctccggggtcagagaggaggcacccctgaagctctccaaggccgtgcataaggctgtgctgaccatcgacgaaaaagggactgaagctgctggggccatgtttttagaggccatacccatgtctatcccccccggggtcaagttcaaaaaaccctttgtcttcttaatgattgaacaaaataccaagtctcccctcttcatgggaaaagtggtgaatcccacccaaaaataa

SEQ ID NO: 57 - DNA, 1701 bp, Homo sapiens
  CDS (1)..(1701)
atgagaaggcagtgggggtctgccatgagggcggccgagcaggcgggctgcatggtgagcgcctcccgggccggacagcccgaggcgggcccgtggagctgcagcggggtaatcctgagccgtagcccgggcctggtgctttgccacgggggcatcttcgtccccttcctgcgagctggcagcgaagtcctggccgcggccggcgccgtcttcctgcctggcgacagttgcagggacgacctgcgcctgcacgtgcagtgggccccaacggccgcgggtcccgggggcggcgcggagcggggccgcccagggctgtgcacgccccagtgcgcgagcctcgagcccggcccacctgccccgtcccgcgggcgtcccctgcagccccggcttcctgctgagctgctgctgctgctgagctgcccggccttctgggcccacttcgcgcgcctcttcggggacgaggcagcggaacagtggcgcttctcgagcgcggcgcgggatgacgaagtgtcggaggacgaggaggcggatcaactgagagcgctgggctggtttgcgctgctgggcgtgcggctaggccaggaggaggtggaggaggagcgcgggccagccatggcggtgtcgcctctcggggccgtgcccaagggtgcgccattgctggtctgcggctcccctttcggcgccttctgccccgacatctttctcaacacgctgagctgcggggtgctcagcaacgtggccggcccactgctgcttaccgacgcacgctgcctgcccggcaccgagggcggcggcgtgttcaccgcgcggcccgcgggggcgctggtggcgctggtggtggcgccgctctgttggaaggccggcgaatgggtgggcttcacgctgctctgcgccgccgccccccttttccgcgccgcccgcgacgcgcttcaccgcctgccgcacagcaccgctgccctggccgcccttctgccgccagaggtgggcgtcccgtggggtctgcccctccgagactccgggcccctgtgggcagccgcggcagtgttggtggagtgcggcaccgtatggggctccggagtggctgtggcaccccgccttgtagtgacctgtcggcacgtgtcccctcgggaagcagccagggtcctggtgcgctccaccacccccaagagtgtggccatctggggccgtgtggtatttgccactcaggagacatgtccctatgacatagcagtggtgagcctggaggaggacctggatgatgtccccatccctgtgcccgctgagcacttccatgaaggcgaggctgtgagtgtggtgggctttggcgtctttggccagtcttgcgggccctcggtgacctcaggcatcctttcggctgtggtgcaggtgaatggcacgcccgtaatgctgcagaccacgtgtgctgtgcacagcggctccagtgggggacccctcttctccaaccactcaggaaacctccttggcataatcaccagcaacacccgggacaataatacgggggccacctacccccacctgaacttcagcattcccatcacggtgctccagccggccctgcagcagtacagccagacccaagacctaggtggcctccgtgagctggaccgcgctgctgagccagtcagggtggtgtggcggttgcagcggcccctggcagaggccccgcggagcaagctctga

SEQ ID NO: 58 - DNA, 1507 bp, Homo sapiens
  CDS (219)..(1106)
ggttttggcctccggctgtcccgctccggctcctggggctccccgcagacgctgcttttcttgctccactgggggtgcctcttcctgggcgcccgccgcgctgcatcctgctcgccctgtctgggaatggggccgcccccgggcttgggccggcccggctggggcccccgaggcgcttccgccccgtagtgaccgcctggtgccgccccccccccaggatgaagggcggcgagggggacgcgggcgagcaggccccgctgaaccctgagggcgagagccctgcaggctcggccacgtaccgggagttcgtgcaccgcggctacctggacctcatgggggccagtcagcactcgctgcgggcgctcagctggcgccgcctctacctcagccgggccaagctcaaagcttccagccgcacgtctgccttgctctcgggcttcgccatggtggccatggtggaggtgcagctggagagtgaccacgagtacccaccaggcctgctggtggccttcagtgcctgcaccaccgtgctggtggctgtgcacctctttgcactcatggtctccacgtgtctgctgccccacattgaagctgtgagcaacatccacaacctcaactctgtccaccagtcgccacaccagagactgcaccgctacgtggagctggcctggggcttctccactgccctgggcacctttctcttccttgctgaagttgtcctggttggttgggtcaagtttgtgcccattggggctcccttggacacaccgacccccatggtgcccacatcccgggtgcccgggactctggcaccagtggctacctcccttagtccagcttccaatctcccacggtcctctgcgtctgcagcaccgtcccaggctgagccagcctgcccaccccggcaagcctgtggtggtggtggggcccatgggccaggctggcaagcagccatggcctccacagccatcatggtacccgtggggctcgtgtttgtggcctttgccctgcatttctaccgctccttggtggcacacaagacagaccgctacaagcaggaactagaggaactgaatcgcctgcagggggagctgcaggctgtgtgagactggtgttagccaccgctcactgcaagcactgcctccctccggggtctgtaagaggccgcaggggcctacagacctcatccccccatcccctggctggagccacttccagtggccactctcaggcagagttcagattcctgcccgcagggtcctctgggctgggccttggggcagctcccacattcccagggattttccccatcagtctgtcccttgggttttgcaagctactctgcacctgggctggcctcagttgaaggatcatgcagtagatagaggggaggcagggagagcttgtgggaccttcagtgctgactttagccaccatttccattcctatacaggatgtgaaggtcagaaggcagccaattgttggtttaatttttttttttttttga

SEQ ID NO: 59 - DNA, 1686 bp, Homo sapiens
  CDS (1)..(1686)
atggcaaatatgaatagtgattctaggcatcttggcacctctgaggtagatcatgaaagagatcctggacctatgaatatccagtttgagccatcggatctaagatccaaaaggcctttctgtatagagcccacaaacatcgtgaatgtgaatcatgtcattcagagggttagtgaccatgcctctgccatgaacaagagaattcattactacagccggctcaccactcctgcagacaaggcactgattgccccagaccatgtagttccagctccagaagagtgctatgtgtatagtccattgggctctgcttataaacttcaaagttacactgaaggatacggtaaaaacaccagtttagtaaccatttttatgatttggaataccatgatgggaacatctatactaagcattccttggggcataaaacaggctggatttactactggaatgtgtgtcatcatactgatgggccttttaacactttattgctgctacagagtagtgaaatcacggactatgatgttttcgttggataccactagctgggaatatccagatgtctgcagacattatttcggctcctttgggcagtggtcgagtctccttttctccttggtgtctctcattggagcaatgatagtttattgggtgcttatgtcaaattttctttttaatactggaaagtttatttttaattttattcatcacattaatgacacagacactatactgagtaccaataatagcaaccctgtgatttgtccaagtgccgggagtggaggccatcctgacaacagctctatgattttctatgccaatgacacaggagcccaacagtttgaaaagtggtgggataagtccaggacagtccccttttatcttgtagggctcctcctcccactgctcaatttcaagtctccttcatttttttcaaaatttaatatcctaggcacagtgtctgtcctttatttgattttccttgtcacctttaaggctgttcgcttgggatttcatttggaatttcattggtttataccaacagaattttttgtaccagagataagatttcagtttccacagctgactggagtgcttacccttgctttttttattcataattgtatcatcacactcttgaagaacaacaagaaacaagaaaacaatgtgagggacttgtgcattgcttatatgctggtgacattaacttatctctatattggagtcctggtttttgcttcatttccttcaccaccattatccaaagattgtattgagcagaattttttagacaacttccctagcagtgacaccctgtccttcattgcaaggatattcctgctgttccagatgatgactgtatacccactcttaggctacctggctcgtgtccagcttttgggccatatcttcggtgacatttatcctagcattttccatgtgctgattcttaatctaattattgtgggagctggagtgatcatggcctgtttctacccaaacataggagggatcataagatattcaggagcagcatgtggactggcctttgtattcatatacccatctctcatctatataatttccctccaccaagaagagcgtctgacatggcctaaattaatcttccacgttttcatcatcattttgggcgtggctaacctgattgttcagttttttatgtga

SEQ ID NO: 60 - DNA, 1268 bp, Homo sapiens
  CDS (142)..(1251)
agtaaacaaataaggtatgatctcgtgaaatcttgagagaaactgaatgacgaatgaaactattgttcctgtttcacacagaagaaaactgaggttaaaaggggttggcactcatcatgagcccctgttctcattctgcaaatggtgaagctctctattgtcctgaccccacagttcctgtcccatgaccagggccagctcaccaaggagctgcagcagcatgtaaagtcagtgacatgcccatgcgagtacctgaggaaggttatcaatactctggctgaccatcatcatcgtgggactgactttggtggaagtccttggttacatgtcattattgcgtttccgacaagttataaagttgtcattaccctctggatagtttacctttgggtgtctctcctgaagactatcttctggtctcgaaatggacatgatggatccacggatgtacagcagagagccaggaggtccaaccgccgtagacaggaaggaattaaaattgtcctggaagacatctttactttatggagacaggtggaaaccaaagttcgagctaaaatccgtaagatgaaggtgacaacaaaagtcaaccgtcatgacaaaatcaatggaaagaggaagaccgccaaagaacatctgaggaaactaagcatgaaagaacgtgagcacggagaaaaggagaggcaggtgtcagaggcagaggaaaatgggaaattggatatgaaagaaatacacacctacatggaaatgtttcaacgtgcgcaagcgttgcggcggcgggcagaggactactacagatgcaaaatcaccccttctgcaagaaagcctctttgcaaccgggtcagaatggcggcagtggagcatcgtcattcttcaggattgccctactggccctacctcacagctgaaactttaaaaaacaggatgggccaccagccacctcctccaactcaacaacattctataattgataactccctgagcctcaagacaccttccgagtgtctgctcactccccttccaccctcagctctaccctcagcggatgataatctcaagacacctgcggagtgtctgctctatccccttccaccctcagcggatgataatctcaagacacctcccgagtgtctgctcactccccttccaccctcagctccaccctcagcggatgataatctcaagacacctcccgagtgtgtctgctcactccccttccaccctcagcggatgataatctcaagaaactaaggaagaataaataaata

SEQ ID NO: 61 - DNA, 1311 bp, Homo sapiens
  CDS (54)..(872)
ggtattttggaaaaatggtaaagaagtgcagagtcaagtcatagcgactaataatgggttattttcttaaattgtatgcttatgttaattctcacagtctttttgtttgggtctgtgacagatcttacaaaagatcttttagacctatgattcttaacaaaattaaagaattaagtcggaaccaatttcccacaatgtctcatctaagaaaggactcacagcccagcagcccaggagatgacgcaatggacaggagtgggctccctgaccttcaaggaagatttgagctatctgggaaaaacagacagtatccactggatgcattggaaccccaacccagcattggggatattaaggacattaaaaaagcagccaagtctatgctagacccagcacataaatctcatttccaccctgtgaccccaagtttagtattcttgtgtttcatatttgatgggttacaccaggcattactgagtgttggtgtgagcaagaggtctaatactgtggttgggaatgagaacgaggaaaggggtactccttatgctagcagattcaaagatatgcctaactttattgcccttgagaagtcatcagttctccgccactgctgtgaccttttgataggcattgcggctggatcaagtgataagatttgcaccagcagtctccaagttcagagacgattcaaggcaatgatggcatctattggaagactttcacatggtgagagtgctgatctgctaatcagctgcaatgcagaatcagccataggttggatcagctcaagaccatgggttggagaattaatgttcacatttctatttggagactttgaatcccctctacacaagctacgcaagtcaagttagttgccaagaaagcacagatgacaacctattaatgctgtgagaatgtttctagatcagtgcatggatggctccattgctctacgggccattgtgtctgagatcccagtctttgaggagaaaaaaaacaatggttaaaaaggcattggggaaatattttgagtttgggggtgtactttgccaccccattattggggagctgtcaccacgaatgttcccaaacttagcaacagcggcaaactactgggccaagatgagcaaccccacatttttgggatttaaagctcctgatgttataccaggatcaaccatcacactccctttgcttcaaatggcatctaccccgtaagatcttgaggggggagtgttgggtggaatcatagatccatgcactcctaacatgaactaattctcattatttaaaaaaaaaaaaaaaaaaaaa

SEQ ID NO: 62 - DNA, 1005 bp, Homo sapiens
  CDS (359)..(784)
  misc_feature (1)...(1005): n = a,t,c or g
tttatacgactcactatagggaatttggccctcgagcagtaattcggcacgaggccacgttacggatcggcttactccgcggagttggcctcatttctgcagtcggcgctccctgtagtttctcctctcgaacgccaggtggagcaaccggccggataccgccacagccctggcaggcggcgctgtgatgcctgagctgatcctgtatgttgcaatcactctatccgtggctgagcgactcgttggcccgggtcacgcatgcgctgagccttcctttcgctcttcccgctgctccgcccctctctgtcttctctgcagtgggagcagctctcctgccacagctcctcaccccctgaaaatgttcgcctgctccaagtttgtctccactccctccttggtcaatagggccttacagctgctgagccgtccgctatctgcaatggtgctgaaacgaccggagatactgacagatgagagcctcagcagcttggcagtctcatgtccccttacctcacttgactctagccgcagcttccaaaccagtgccatttcaagggacatcgacacagcagccaagttcattggaactggggctgtcacagttggggtggctggttttggggctgggattggaactgtgtttgggagcctcatcattggttatgccaggaacccttttttgaaacaacagcttttttcctacgccattttgggctttgccctctcggaggccatggggcttttttgtttaaaggaagcctttttcatcctttttgccatgtgaaggaaccgtttccccctcccatagttttcccgggtttggttggccccgtgtgttccttttcctaaacctccccaggcaacctggggaaagtggttggctcagggtttgacaaaaaaaaaacaaataaatactgtattaataagaaaaaaaaaaaaaaaaaaaaaaaaaaaaaaaaaaaaaaaaaaaaaaaaaaaaaaaaaaagncggcggccgcaagctta

SEQ ID NO: 63 - DNA, 5034 bp, Homo sapiens
  CDS (76)..(3282)
atggagaggcttaagcatgtgttaactgccactgggaagaagtcggcaatcacggaagctaccggaggggataatatggtctccggcgatggacgccccaaaagcaggtcagtttcgggcctccgagctgggtctggcagttggaaacgcgcgctgcctaggcgccgaattccttgcttttctcgcctggagtcgctcggcaggcgcccaggccctcggggctcgggttgtgctcccctcggggcctgcctgctgggccgccctttgagcctaggccgcggaagctggggctcccgatccccaccctcctgcgcgacacccgcagggcgggccaccccaccgctggccttgacccgcacccctctctctccggtggccgctgcctgctgccagcggcttcctggcccccgatacgcctttgagtaccttattgaaacattaaatgacagttcacataagaagttcttcgatgtatctaaacttggcaccaagtatgatgttctgccttactcaatacgggtcttgttggaagctgctgtacgaaattgtgatggctttttaatgaagaaggaagatgttatgaacattttagactggaaaaccaaacaaagcaatgttgaagtgccctttttccctgcccgtgttcttcttcaagattttactggaataccagcaatggtggattttgctgctatgagggaggcagtgaaaactcttggaggtgatcctgagaaagtccatcctgcttgtccgacagatcttacagttgaccattctttacaaattgacttcagtaaatgtgcaatacagaatgcaccaaatcctggaggtggtgacctgcagaaagcaggaaagctctctccacttaaagtgcagcctaagaagcttccctgcagaggccagactacctgccgaggatcttgtgattctggagaactaggccgaaactcaggaacattttcttcgcagattgagaatacacccatcctgtgtccttttcatttgcaaccagtgcctgaacctgaaacagtgttaaaaaatcaagaagtagaattcggcagaaatcgagagaggcttcagttttttaagtggagttcaagagttttaaagaatgtggcagtgatccctcctggaactggaatggctcatcaaataaacttagaatatttgtcaagagtggtttttgaagaaaaagacctcctcttcccagacagtgtagtcggcacagattcacacataacgatggtgaatggtttagggattctggggtggggggttggaggcattgaaacagaagcagttatgcttggtctgccagtttctcttactttaccagaggtggttggatgtgagttaactgggtcatcaaacccttttgttacatccatagatgttgttcttggtattacaaagcacctcaggcaagtaggagtggctggaaagtttgttgagttttttggaagtggagtttcacaattatctatagttgatcgaactacaatagcaaacatgtgtccggaatatggtgctatcctcagctttttccctgttgacaatgtgacattaaaacatttagaacatacaggttttagcaaagccaaactcgaatcaatggaaacataccttaaagctgtgaaattgtttcgaaatgaccagaattcttcaggagaacctgaatactcccaggtgatccagattaatctgaattcaatagttccatctgttagtggtccaaaaagacctcaggatagagttgctgtgacagatatgaaaagcgatttccaggcttgcttaaatgaaaaggttggatttaaaggcttccaaattgcagctgaaaaacaaaaggatattgtctccattcattatgaaggaagtgaatataagctgtctcatggatcagtggtcattgctgcagttatcagttgtaccaataattgcaatccatctgtcatgcttgctgcaggtcttttggctaaaaaggctgttgaagctggtctgcgtgttaaaccttatataagaacaagtttatctccaggcagtgggatggttacacattacctcagttcaagtggagtattaccatatctaagtaagcttggatttgaaatcgttggctatggatgttcaacttgtgtgggaaatacagcacccttatcagacgcagttttaaatgcagtaaaacagggtgatttggttacctgtggaattttatctggaaacaaaaattttgaaggtcgtctttgtgattgtgttcgtgccaattatcttgcctctccacccttagtggtagcttatgccatagcaggcacagtgaatatagatttccagacagaacctttaggtactgaccccaccggcaagaacatttacctgcatgatatttggcctagtcgagaagaagttcatcgagtagaggaagaacatgttatactatccatgtttaaagcattaaaagataaaatagaaatggggaataaacggtggaattccttagaagcaccggattcagttttgtttccatgggacttaaagtctacttatatcagatgcccttcattttttgataaacttaccaaagagccaattgcactccaggctattgaaaatgcccatgtcttattatatttgggagactctgtcacaacagatcatatatcacctgcaggaagtatcgctaggaatagtgctgccgctaagtatttgacaaacagaggccttacccctcgtgaattcaactcttacggagctcgaagaggtaatgatgctgtaatgacaagaggcacttttgcaaatatcaagctttttaataagtttattggaaaaccagctcctaaaacaattcattttccatcaggacagacgctagatgtatttgaggctgcagagctgtaccagaaagaaggtatcccactgattattttagcaggaaagaaatatggttcaggaaactccagagactgggctgccaaaggaccgtatttactgggtgtgaaagctgttttggctgaaagttatgaaaaaatacacaaagatcatttgattggaattggcatagctccacttcagttccttccaggagaaaatgcagattccttgggcctctccggtagagaaacattttctttaacatttcctgaagaactgtctcctggaattacattgaatatacagacaagcactggaaaagtattcagcgtgattgcttcgtttgaagatgatgtggaaataacattatacaaacatggaggattattaaactttgtggcacgaaaattctcatagtatctacttaccatagatacctttcataactggtaactgcaaagccttttgtgctggacccaggaatccttaccatggagcagcagatagtcccagtatactcacttatctcatccatggatgtaaatgatgatgaatcaacatagtaactgaaatgaaatcttcttgattttaaataatatacgaatggtgctattaatattgctaaaatcaacgtgtgaagtgtgttgtggaagagacctgtaagtatgggggggggcgatattttatcagaccattttgtaaataaaggcagaatttgtgttgaagattcttatatgaataaccttcctggatttgtttagttttgcaccaataaaactgtgtactactgtttgttggtttaagagtagcagattgaaatataagaagccagattagactctaaaattgtggccattggaatctcatttataaatggaccttttaagtatattaattcctcttcagaattgagctggacacatttggcattcttagtttgtcatataaccaggtttatccttagtctaactgcaagggatagaacctgccccaggtcacaatcattctgtccaatccagccaaggttccctccacatatgaagatggaccatggcaggatacaactgattgtgtggcaccatgtattagcagtgggaatatgtatcacatatgatgcagcctttcatatttcagcagtttgccactgtgactgtctggcaagcccccagatggcgttatattaattggattagattattttgctcaccttatgtaatactgtaacttcctataacctaatattttcggtatcattaaccaaaatttcacactcatagttgctaaagagaatgttattcaatcattaaactctgaactgatttcttctatacatttaaattatccaccctcaataatacgggtgctcaaccctatgcattttttaagtgttgctatttcttaattaaattgatttcctgtcattttgaatcatttatcacctgcgatgcatgattctattaattttgttatgttactgttttaaccaaagctgaccgtaaggataaaacacttaagttgttgctgagtactatatatcctcaatatgcatgtctgcccatcacatcaaatgttctgtcaacaagatgtttggtaattttttttaaaaaggttggaaaattaattatagaaggttctatactgtttttttaattaagaaactaaatctagcaggctaaaggttaattgtagtgattttttttcacatagatatctttctatgacctagttagttactgcaattcagaattagttcacattgcataaagaattacttgttgtaagcaaaatgctgaaactaccaaaccagtggatgaagaccactaagaactttgcacataatcatacaatcttttgaaaatattttgcaaatatgtgtttagacaataagatggactagagttcgacaaaatgatttctttatttaaattttgtataagtattttcttcgacactttcaaattatattgtgttcttgatatatgctgtatatttatttgttagtgcatgtgtttttaatttacatgaaaacatgagttaggagaaattacaggttgaaagatgaaatgcctgtatgtgctctgaagaaatggtaattccagattgtgcagggggaaacaaatctattttgttttgttttgttttttgagacggattctttccctgtggctg

SEQ ID NO: 64 - DNA, 2097 bp, Homo sapiens
  CDS (447)..(1043)
tcagtttggctgtttcttaggaggggtgctgagcctgaaatcactagacagttggtcagtatcaaaagatggacaagaagcagaggagagcagggaaaaatcaagccagcaggtctgtggaaacgtgcatgagcttgccgcaaagtctaactttcggggaccttccaaaaatacacacagcttcagctccactttcatcttccaaatctcgcacaagttgcttttagggcctatcttaaccaggagcatgcaaaaaaggaattctgtgattccctggatggttaccattcttttgaatgcggctccatagatcccctgacaggctcccactatacctgtcgccgaagtcccagactcctcaccaatggctactatatttggactgaagacagcttccttgcgacaaagatggcaacataactctgaacccatcccagaccagcgttatgtataaggagaacttagttaggatatttagaaagaaaaagagaatctgccattccttttcttctctcttcaacctcagtacctccaaatcttggctgcatggaagtatctttggtgacatcaactcttctccaagtgaagacaactggttgaaggggaccaggaggttggacacagaccattgcaatggaaatgcagatgatttagactgttcttctctgactgatgactgggagtcagggaagatgaatgcagagtctgtgatcacctcctcttccagccacatcatatctcagcctcctggaggaaactcccatagcttgtctcttcagtcccagttgacagcttctgaacgtttccaagagaatagttcggatcattcagaaaccaggttgttgcaagaggtcttctttcaggcaatcctgcttgctgtgtgcttaatcatttctgcatgtgcaagatggtttatgggagaaatattagccagtgtcttcacatgctcattgatgataactgtagcttatgtgaaatcattgtttctcagccttgccagctatttcaaaaccactgcctgtgctcggtttgtcaaaatttgacaaccatttaggaatgccttcgatgaatgtcctccatctgaatatctggaaattgtccaacttgcagtctacttggaatcaagtgttttattggaagggagtaagcgagtaatggagaaaaagccattttagtttgactatgtgattttaaaatgatctcagtttttccatcaaaattataatatgctcatgaaaataatattaatttgccttccctttgcaaacaccggcagttgaaaggaaaaggacggggaatgtgatggaaaagagaccgcctggaataaatgtccccctatgattctttaaggcagtggttctcgagcttgaattttcattaggaaattctgtgaggagcttgtaaccagatttctgggtctgccacatgcacctatctcttgctgaattgctttaatagaataatgagagcaagtttgtctaactaataccaacctgacaacttgaataacaataaatgcaatttgtacataaaatataatgctgcaaaagtttgtcattcacctcagtggagtgacttgatattaggtggtaaccgtagatgatggttaatatgaaaatggacaggaaagaagcattttctgaaagttatattcttttgaaccacgttctaaaccaagtttttaatcttcttggggctcgtaattacctttcactttaatgtcacttaaagatataacacagaaaaatgccttgagggcaaaatataggcaaaacaccaatgcgctttcaaatgcatgaaaatggtgcagttgtacccttgagccttgactcaagggctgtagatgttccctttccaccccccacacttggtgcgtgttcacaaagcaaatatggcctgtaattcaaatttgttctatgtgatactctctgagtaaaaactcatacatgcagaaaattgtctttgctcgaaatggtaatgccaaaatataactttatatataatttgcatttagtacatttttggttaaaaaataaactaataaataagtgaagtcatcagcaaaaaaaaaaaaaaaaaaagttttgccctatagtg

SEQ ID NO: 65 - DNA, 2135 bp, Homo sapiens
  CDS (197)..(1081)
ggatgaaggaacagaagatagaagcctctagtttatgtcttgcttccggtagatccctggtgataagggtacctgcactactggagtcttcctgctgaagctggaacatcagctattcccatcttcttacatgcctccactgtttgcaattatacatattgatacatgtatcaacatatgtaactgttgatcaggtatgatacattctacttctctctcatttgtttatgcaggttcttccaggttggaaagagaatatgctggagagctgtctcccacgtgcattttcccaagtttcacctgtgattccctggatggttaccattcttttgaatgcggctccatagatcccctgacaggctcccactatacctgtcgccgaagtcccagactcctcaccaatggctactatatttggactgaagacagcttcctgtgcgacaaagatggcaacataactctgaacccatcccagaccagcgttatgtataaggagaacttagttaggatatttagaaagaaaaagagaatctgccattccttttcttctctcttcaacctcagtacctccaaatcttggctgcatggaagtatctttggtgacatcaactcttctccaagtgaagacaactggttgaaggggaccaggaggttggacacagaccattgcaatggaaatgcagatgatttagactgttcttctctgactgatgactgggagtcagggaagatgaatgcagagtctgtgatcacctcctcttccagccacatcatatctcagcctcctggaggaaactcccatagcttgtctcttcagtcccagttgacagcttctgaacgtttccaagagaatagttcggatcattcagaaaccaggttgttgcaagaggtcttctttcaggcaatcctgcttgctgtgtgcttaatcatttctgcatgtgcaagatggtttatgggagaaatattagccagtgtcttcacatgctcattgatgataactgtagcttatgtgaaatcattgtttctcagccttgccagctatttcaaaaccactgcctgtgctcggtttgtcaaaatttgacaaccatttaggaatgccttcgatgaatgtcctccatctgaatatctggaaattgtccaacttgcagtctacttggaatcaagtgttttattggaagggagtaagcgagtaatggagaaaaagccattttagtttgactatgtgattttaaaatgatctcagtttttccatcaaaattataatatgctcatgaaaataatattaatttgccttccctttgcaaacaccggcagttgaaaggaaaaggacggggaatgtgatggaaaagagaccgcctggaataaatgtccccctatgattctttaaggcagtggttctcgagcttgaattttcattaggaaattctgtgaggagcttgtaaccagatttctgggtctgccacatgcacctatctcttgctgaattgctttaatagaataatgagagcaagtttgtctaactaataccaacctgacaacttgaataacaataaatgcaatttgtacataaaatataatgctgcaaaagtttgtcattcacctcagtggagtgacttgatattaggtggtaaccgtagatgatggttaatatgaaaatggacaggaaagaagcattttctgaaagttatattcttttgaaccacgttctaaaccaagtttttaatcttcttggggctcgtaattacctttcactttaatgtcacttaaagatataacacagaaaaatgccttgagggcaaaatataggcaaaacaccaatgcgctttcaaatgcatgaaaatggtgcagttgtacccttgagccttgactcaagggctgtagatgttccctttccaccccccacacttggtgcgtgttcacaaagcaaatatggcctgtaattcaaatttgttctatgtgatactctctgagtaaaaactcatacatgcagaaaattgtctttgctcgaaatggtaatgccaaaatataactttatatataatttgcatttagtacatttttggttaaaaaataaactaataaataagtgaagtcatcagcaaaaaaaaaaaaaaaaaaagttttgccctatagtg

SEQ ID NO: 66 - DNA, 2097 bp, Homo sapiens
  CDS (297)..(1043)
tcagtttggctgtttcttaggaggggtgctgagcctgaaatcactagacagttggtcagtatcaaaagatggacaagaagcagaggagagcagggaaaaatcaagccagcaggtctgtggaaacgtgcatgagcttgccgcaaagtctaactttcggggaccttccaaaaatacacacagcttcagctccactttcatcttccaaatctcgcacaagttgcttttagggcctatcttaaccaggagcatgcaaaaaaggaattctgtgattccctggatggttaccattcttttgaatgcggctccatagatcccctgacaggctcccactatacctgtcgccgaagcccagactcctcaccaatggctactatatttggactgaagacagcttcctgtgcgacaaagatggcaacataactctgaacccatcccagaccagcgttatgtataaggagaacttagttaggatatttagaaagaaaaagagaatctgccattccttttcttctctcttcaacctcagtacctccaaatcttggctgcatggaagtatctttggtgacatcaactcttctccaagtgaagacaactggttgaaggggaccaggaggttggacacagaccattgcaatggaaatgcagatgatttagactgttcttctctgactgatgactgggagtcagggaagatgaatgcagagtctgtgatcacctcctcttccagccacatcatatctcagcctcctggaggaaactcccatagcttgtctcttcagtcccagttgacagcttctgaacgtttccaagagaatagttcggatcattcagaaaccaggttgttgcaagaggtcttctttcaggcaatcctgcttgctgtgtgcttaatcatttctgcatgtgcaagatggtttatgggagaaatattagccagtgtcttcacatgctcattgatgataactgtagcttatgtgaaatcattgtttctcagccttgccagctatttcaaaaccactgcctgtgctcggtttgtcaaaatttgacaaccatttaggaatgccttcgatgaatgtcctccatctgaatatctggaaattgtccaacttgcagtctacttggaatcaagtgttttattggaagggagtaagcgagtaatggagaaaaagccattttagtttgactatgtgattttaaaatgatctcagtttttccatcaaaattataatatgctcatgaaaataatattaatttgccttccctttgcaaacaccggcagttgaaaggaaaaggacggggaatgtgatggaaaagagaccgcctggaataaatgtccccctatgattctttaaggcagtggttctcgagcttgaattttcattaggaaattctgtgaggagcttgtaaccagatttctgggtctgccacatgcacctatctcttgctgaattgctttaatagaataatgagagcaagtttgtctaactaataccaacctgacaacttgaataacaataaatgcaatttgtacataaaatataatgctgcaaaagtttgtcattcacctcagtggagtgacttgatattaggtggtaaccgtagatgatggttaatatgaaaatggacaggaaagaagcattttctgaaagttatattcttttgaaccacgttctaaaccaagtttttaatcttcttggggctcgtaattacctttcactttaatgtcacttaaagatataacacagaaaaatgccttgagggcaaaatataggcaaaacaccaatgcgctttcaaatgcatgaaaatggtgcagttgtacccttgagccttgactcaagggctgtagatgttccctttccaccccccacacttggtgcgtgttcacaaagcaaatatggcctgtaattcaaatttgttctatgtgatactctctgagtaaaaactcatacatgcagaaaattgtctttgctcgaaatggtaatgccaaaatataactttatatataatttgcatttagtacatttttggttaaaaaataaactaataaataagtgaagtcatcagcaaaaaaaaaaaaaaaaaaagttttgccctatagtg

SEQ ID NO: 67 - DNA, 3389 bp, Homo sapiens
  CDS (617)..(1099)
  misc_feature (1)...(3389): n = a,t,c or g
atgacgactaaatcctatgatctgctgtctgcaagctggagccatgggaaagacacagagctatacttccagttcaagtctgaaggcctgagaaccagaagaaccaatgatgggagttctagtctgagggaaagagaagatcaatgttcaagggggtcaggatgtctagcatccctgacccacatccctcaatgccaggacagtgtcatcatgacaaccaaaaatgtctccttatttccagaatattctctaaaggggagtatcacctttgtgacacaagaagaagagaaaataaaagatgtaatcgatggctatcttttggctgctgatgaagtgagggaaagtggaggagagtcggcgccgagatgggcggataaaaggagcgaccgctcagcagcgagagggagaggcgagagtaaggcgcccagacaccatgtggacaaggggaggagagaaatcagaggtggcgcgcgaaggctgagcgcccaggcagccagagcccagatcggaagagccgagtccgggcagaggggtccgcgggctctggaggtgctggacgggtgcgatccgagagcagaccggggccctcgcgagcctctcccggcccctgcccgcgatgagcgaggccagccgactgtgctccggctactacagcctcaaccagagcttcgtggagcccttccagtgcccccggcgcggcgagggggcagcgctccagtattgctgcggcttcgccgacctcaagtactgctgcagcgagccgggcagctacttcccctacaagcacagctacatgtggagcctcagcattggtgccttgattggactaggaattgctgcccttgttttactcgcctttgtcatcagtgtctgtgtcctttgctatttatttctgtatacgaaacctcaaagattagacactggccttaagcttcaacacttagaggcttcttccactcaagaaggcaagtcaaatggaaaaaccaaagccctcaattcaaatgcagcatcaaatgcaacaaatgaaacatactatgaagctgatgatataattcaagaaaaaacaatggatgcaacacaaatccacattgcttattaactaaaaattctgtgttttaaatgcttactggagagatgggacaataaaaataaagcgtgcacttgaaacggattgtaatattgcttttcaaaaattcgtcactcacaaagcaagacacagctgcatttttgatcattcagttactttattaaacgcacattaaggttttattggttttcctttgtataaatttatttgctaattaagatgtttctgtatcacatgagattatgctaattattcaggagaaattaaataatttatcaataacaagataagcagtcctatctcagtgaagaacagtgagaagtttatgtcacattaccagcatttctcaactttctgatacttacaggcagttattcttatgagatggtactggataggtaaatatcaagggaactgtcttaaaaactagaggtgacttgttcttaaatctcttagaagtcaacccacatctttttagatttttctgggcacaaacaatatactcagtaacaaaaaaatcacaatgtataatctgtacaataaatattttgtttcaagagataagcataacaaaaaatcctttgctgatatatttcctaaataatctgtataatgaaagctacaaaacaaatgagttctctggtcccacctaatgctatcacattaataccacctagaaatctagaaataaaactaatttctgcaaattataatttttaaagatttttattcataagtgtgttttctattataacacagacctggttttgtaacagaattcaacagaaaaaaaaagggaattattttaagcagctctactgagcatatctactatgtcctgtagtttttgtagtcagaaactagcatttcagacaagatctggcacatttagggtggtatggccatagccaaaaactagcatttcaaaatgtgctgaatacagcttctctggtctgatatataaaaaagaataccttatttttcttgggcatgcaaagctcagggttacaaacttttcgtcattagcctgtcaaaatttctaccaagtactaaggttatcttctagaccagaattaagagaagtttctgtnatgatggnaatgttctttctatatctncactnnnnnnnnnnnnnnnnnnnnnnnnnnnnnncngaacacntaagatgtggctaatncaactgaaaaaataaaatttttcatttatttaattaatttaaataaccctatgtggctatactggcaccatagtgccagatcactattgcaacaacctactgccaaagttgaacttcacattcaaaaatacaattttgcaaaggtttaaatactaaaattgcttaaagtatatgttaagtttgaaaattaagacatttccattataaaaatgacattttacacggccataaaaacaaagaattttcacttattttttgtgaaagtttataaagcttttatgggtgcttcttgatctttgatacaactttgattttaaagtatcccagaaaatttgctatctttacagtaatttaataatattaccatattgtctcaggtgaaaatctaggttgagaaaaatttagttaaggcactggcaccattctacttttgttgctcatggccaaggactataaatggcacaagaagcaagaaacagacagagctagcaaaatgctcactgccccaactcctcccaatttgtgggaaaggcatagtggggtcaggcatgactggatgcatcatgggttgtgctatagaagaggcaccccaattctctgccactctacctatttttagaggagttgggaggagatactgagatcagaagactggccttcgcaactgggattattgtcacactggtataagaaacctactgttcttgggcacccaatgtccaggaagttttggtctcagcactaggatcagctggagtccttgaagcactccctgctgagctagcttatcactaggttacctgaggtagaaccacagggctcatccagtggaccaactggtatgtttctctgtaactctgaagcagttgtgcttcacaggttaagccaaattttaaaagcaaggggccttattaaattacagcacattttgtacactgaaaaatattctaaatggtttattcggacctaacaaatattaaaatagtgatagaatttaagtcagtcaaaaataacctaaaatacaattaagaacaaaacccatctcaaagtatgtacatgtacatataactttggggatggatctaataaagaatccagtagctttatgtgtttttactcgtgccg

SEQ ID NO: 68 - DNA, 3497 bp, Homo sapiens
  CDS (117)..(1301)
ccggcagactccggagggtagagcgctgtgccggttccgctgccgctggccaggagcgcggggacagttcggggctgcgccggaggccggcccgccttcccgggggttccgttatcatgtcgctgaggcagcgcctggcccagctggttggccgtctgcaggacccgcagaaagtggcccgtttccagcggcgcaatcagtgcccggccaagccggacggcggcggcgcccccaacggcgtgcggaacgggctggcggccgagctgggcccggcctcgccgcggcgcgcgggcgctctgcgccgcaactcgctgacgggcgaggagggccagctggcccgcgtgagcaactggccgctctactgcctgttctgcttcggcacggagctgggcaacgaactcttctacatcctgttcttccccttctggatctggaacctggaccctctggtgggccggaggctcgtggtcatctgggtgctggtcatgtacctgggccagtgcaccaaggacatcatccgctggccgaggcccgcctcgccgcccgtggtcaagttggaggtcttctacaactctgagtacagcatgccctccacccatgccatgtccggcaccgccatccccatttctatggtcctcctcacctatggccgctggcagtaccctcttatatatggactgattcttattccctgctggtgttctctagtttgcctaagtagaatttacatgggaatgcactctattctggatattattgctggattcctatataccattttaatcttagctgtcttctatccatttgtggacctgattgacaacttcaaccaaactcacaaatatgctccattcatcatcatcgggcttcatttagctttggggatcttttctttcactcttgacacctggagcacatcccgaggagacacagccgagatactaggaagtggtgctggaattgcatgtggatctcatgttacttataacatgggtctagtattagatccttctctagatacattacctttagctgggccccccattactgtgactctgtttggaaaagccatattgcggatcctcatagggatggtatttgtactaataatcagagatgtaatgaaaaagatcaccattcctttagcctgcaaaatcttcaatataccgtgtgatgatattcgaaaagcaagacagcacatggaagttgaacttccttatcggtatattacctatggaatggttggtttctccatcacattttttgttccttacatatttttctttattggtatctcttgatggagaagtattgtttatgataagaaaggagggtatcagttactgatacccaaaaatatattccaggtaaagccaggtcagaattaggcttttgcaggaatttaacttaaataattatttaagtaaattcataagagtcagtgcattttatcattgcacatccagatactgttttaggtgagctgagctatttcgttactgagaaaatgataagtatccatttagaatgttcatgtaatgtttggagagttttgtattatggattcaacttatatataatatatataaggtacataatatgcaattatatatctgatatatattatatataaaataatatacctaagtgtttttttaaactatgggagtgtattataaaatcaataataatatgcaaacagttgtgcctgtgtatttgaactacatacaggtatgttgttattaacagatatatttaacatttatttactatgggagccatttcctaattgaattgcgtaattactagaccagaatgcatatgctactatacattgatttactgcctgtttttacactgccattacctttcatgttatccatgatgttgaacatgggaggcatttttaatggaccaaatttttagaaaaattagtttttggatttttttttaagttctgtatactgttttgaatgaactttatttgcagctattctggatgtcagtttaataattcaggtactgaattttattgcttgctaattgtgcctttccgttgctaaattaagaaatgctatgtgtactgtgatgtaaaaataagacattaactttatcttaagttacatataatcaagcaaatattttaaaaaatgtatgtcagggtgacaggcataaaagtaaattacccttaactctttagcctttatttagaaagaaatgtggaatgggctaaactttctcaccaatttattagaaagctaaatggataaatacttccctttttgtagatatttttctgtgcattgtaagttataggagcaggacatattttttgtacattgtcttgattgtttatactgcaggtaggtatttccagtgaatggaaacgttgaaatttatagatgggacaatgcacatacttcatatgtaaacaaagcatttttctaaataatttggaaaggattggatttagcaccgttaacttttaatacccatttattggctatttaaggtaaattataaaacctaaaattagtatcagtattttagatcctattattttttcaactttctattattttcacagtggaaaatttgcgtatagtattaaactattcttttttctgtctacctttatattttgaagtgtggttgtacttacgttaatagtaagtgtatttgtagaaagtttttcataaagaagagattaactttccatataaataaataccaggtatgaaattactgattttagtgcaatatctgtatgattatccagaactatcacttcagatgtttctattttgggcaccataactatttgagctcatatttttataattctgattgagaatttaggggcatggtaatttttaccaaaactgaagctggtaattttaagtaaagcaactaaatttaccctttacttattagttaaaaggaaaccaaggcatgtaggaaaatattggtacgttggaaaatgtgaaaagagctttactttcaaaatgtatgtttaatgaattgaattttagggaccgtttcccataatttgggcctatgctatcctgttgatttttatgtctagcttaaaaggtatttgaaaatgttccatttgtgttttattattttctgtcctatgacagttctatgctaaatgtattttaaaataaaagccaaattgaagattacaacacaacccacaccccaaccaccccccgccaaacgccggcccacgaccgccacccaccgaacgacgcacacaacccagccacatacaccaaccaccacaccaaaaacaaaacgcggcgcgccccaagaccactcccgccgagcacaccactccgcccccctctcatacccagcgcgaccccacgaccctataaccaacacaccccggcccgcccacaccgcacccaacacgacccccgcaccaaaaacacccccgcggcgaaccgcgcccccccaccaagccgccagataacccgacgggagccccg

SEQ ID NO: 69 - DNA, 1943 bp, Homo sapiens
  CDS (235)..(1245)
  misc_feature (1)...(1943): n = a,t,c or g
agagaccacagaaaccttaaggggctaagggttagcgatggcctcgggtgtgctgtgtatgcatatgctgccggagtagcgggctgggccgaggtacctgcgactctcggtgacaatcgtctgcagtgatgtgctgatcgccgtcagccacctggnctatggactgagtgtcacattcgtcaggtaccactctaggcctcgcacatctcgataatacctcgaaggctcagttatatgagatatgtccggctaactctcagtggtatacaccctaggcctattacagggtcgccgtcaccgctgaaggagtccttcggcggctgttgtgtcagtggcctgatcgcgatggggacaaaggcgcaagtcgagaggaaactgttgtgcctcttcatattggcgatcctgttgtgctccctggcattgggcagtgttacagtgcactcttctgaacctgaagtcagaattcctgagaataatcctgtgaagttgtcctgtgcctactcgggcttttcttctccccgtgtggagtggaagtttgaccaaggagacaccaccagactcgtttgctataataacaagatcacagcttcctatgaggaccgggtgaccttcttgccaactggtatcaccttcaagtccgtgacacgggaagacactgggacatacacttgtatggtctctgaggaaggcggcaacagctatggggaggtcaaggtcaagctcatcgtgcttgtgcctccatccaagcctacagttaacatcccctcctctgccaccattgggaaccgggcagtgctgacatgctcagaacaagatggttccccaccttctgaatacacctggttcaaagatgggatagtgatgcctacgaatcccaaaagcacccgtgccttcagcaactcttcctatgtcctgaatcccacaacaggagagctggtctttgatcccctgtcagcctctgatactggagaatacagctgtgaggcacggaatgggtatgggacacccatgacttcaaatgctgtgcgcatggaagctgtggagcggaatgtgggggtcatcgtggcagccgtccttgtaaccctgattctcctgggaatcttggtttttggcatctggtttgcctatagccgaggccactttgacagaacaaagaaagggacttcgagtaagaaggtgatttacagccagcctagtgcccgaagtgaaggagaattcaaacagacctcgtcattcctggtgtgagcctggtcggctcaccgcctatcatctgcatttgccttactcaggtgctaccggactctggcccctgatgtctgtagtttcacaggatgccttatttgtcttctacaccccacagggccccctacttcttcggatgtgtttttaataatgtcagctatgtgccccatcctccttcatgccctccctccctttcctaccactgctgagtggcctggaacttgtttaaagtgtttattccccatttctttgagggatcaggaaggaatcctgggtatgccattgacttcccttctaagtagacagcaaaaatggcgggggtcgcaggaatctgcactcaactgcccacctggctggcagggatctttgaataggtatcttgagcttggttctgggctctttccttgtgtactgacgaccagggccagctgttctagagcgggaattagaggctagagcggctgaaatggttgtttggtgatgacactggggtccttccatctctggggcccactctcttctgtcttcccatgggaagtgccactgggatccctctgccctgtcctcctgaatacaagctgactgacattgactgtgtctgtggaaaatgggagctcttgttgtggagagcatagtaaattttcagagaacttgaagccaaaaggatttaaaaccgctgctctaaagaaaagaaaactgga

SEQ ID NO: 70 - DNA, 1002 bp, Homo sapiens
  CDS (401)..(814)
gactactagtccagcgcggtggaattcgtcgggaagggtatcaaggaataacaccctattgtgggcttgcggagaatgggggacttcaaggcgtgtcagtttcaggagggtgagggcaggagcgtgggtggagtcagcaggtccccatgatggccctcactgagagcttcgcccttgtctcctacaagctctgactccattcccagtgggcacccagcacctccaacccctccacagcccccaacccagcctctgtcggaggcgaattctcagagtgagggttccctgtcacttgagagaaggttccctgtgacgtgaccttgggggacgtcattgccctttctgtccccacccaccccctcggcagttctgttggccaggactttggcctagacaaaggatgggggttgtggctgtggagcggaagtgggtctcaaccactataaagcctctctgtgcccgtccggagctggtgaggacagcctgccagagtctggtctctgacactatgggcacacgactcctcccagctctgtttcttgtcctcctggtattgggatttgaggtccaggggacccaacagccccagcaagatgagatgcctagcccgaccttcctcacccaggtgaaggaatctctctccagttactgggagtcagcaaagacagccgcccagaacctgtacgagaagacatacctgcccgctgtagatgagaaactcagggacttgtacagcaaaagcacagcagccatgagcacttacacaggcatttttactgaccaagttctttctgtgctgaagggagaggagtaacagccagaccccccatcagtggacaaggggagagtcccctactcccctgatcccccaggttcagactgagctcccccttcccagtagctcttgcatcctcctcccaactctagcctgaattcttttcaataaaaaatacaattcaagttgcaaaaaaaaaaaaaaaaaaaaccgcggccgcaagctta

SEQ ID NO: 71 - DNA, 976 bp, Homo sapiens
  CDS (84)..(710)
gccgctccggctgcaccgcgctcgctccgagtttcaggctcgtgctaagctagcgccgtcgtcgtctcccttcagtcgccatcatgattatctaccgggacctcatcagccacgatgagatgttctccgacatctacaagatccgggagatcgcggacgggttgtgcctggaggtggaggggaagatggtcagtaggacagaaggtaacattgatgactcgctcattggtggaaatgcctccgctgaaggccccgagggcgaaggtaccgaaagcacagtaatcactggtgtcgatattgtcatgaaccatcacctgcaggaaacaagtttcacaaaagaagcctacaagaagtacatcaaagattacatgaaatcaatcaaagggaaacttgaagaacagagaccagaaagagtaaaaccttttatgacaggggctgcagaacaaatcaagcacatccttgctaatttcaaaaactaccagttctttattggtgaaaacatgaatccagatggcatggttgctctattggactaccgtgagggatggtgtgaccccatatatgattcctctttacggatggttagaacatggacaagctgttcacacatgtggcacttatttgggctcctatcacctgtcatcatactggttctgcttgtcatccacaccaacacaggacttagaccacatgggactgatgtcatctgagctctgctttaatttgactgtgcattattggcactggcggctggtctacgaaacactggctgttgttgcctcaccttactggtttactccaacacaaaagagggcgtcaaataccggagggcacgatacgtccagttgtgacagggcccaagacaataaaacacgcggcaccacgggcagcgtgtcggcaccctgctggatggcacacgacgtcatgtgttcgctccggcgaccttcaaccgagcgccccctcgcacaacgtctaa

SEQ ID NO: 72 - DNA, 2775 bp, Homo sapiens
  CDS (76)..(2514)
ctcggggcgattatttcggccgagccttgacgccgtttttgacggccgataacgaggcttttcaccgagtcagggatgggagcgggaccccgcgggatggttttctcatgggtgcccagagtacgcgacatcctcatcgtctacagcccggatgccgaggaatggtgccagtacctgcagaccctgttcctgtccagtcggcaggtccgcagccagaagatactgactcacaggctgggccccgaggcctccttctcggcagaggacctaagccttttcctcagcacccgctgtgtcgtggtgctgctgtccgcggagctggtgcagcacttccacaagccctccttgctgcccctgctgcagagagctttccatcctccgcaccgcgtggtcaggctgctctgcggcgtgcgggacagcgaggagttcctagacttctttccagattgggcccattggcaggagctcacctgtgacgatgagccagagacctacgtggcagctgtgaaaaaagccatttccgaagattctggctgtgactcagtcactgacactgagcctgaggacgagaaggttgtttcctactcgaagcagcagaacctgccgacggtgacttcacctgggaacctgatggtggtgcagccggaccgcattcgctgtggggcagaaaccactgtctatgttattgtgagatgtaagctggatgacagggtggcgacagaagcagagttttctcctgaggattctccctctgtaaggatggaagccaaggtggagaatgagtacaccatttcagtgaaggctcccaacctttcatctgggaacgtttctctgaagatatattctggagacttagtggtgtgtgaaaccgttatcagctattatactgacatggaagaaattgggaatttattgtccaatgccgcgaatcctgtggaattcatgtgtcaggcctttaaaattgtgccctacaacacagagacccttgataaactgctaaccgaatccctgaagaacaatatccctgcaagcggactgcacctctttggaatcaaccagctggaagaagaagatatgatgacaaatcagagggatgaagagctgcccaccctgttgcattttgctgcgaagtatggactgaagaacctcactgccttgttgctcacctgcccaggagccctgcaggcgtacagcgtggccaacaagcatggccactaccccaacaccatcgctgagaaacacggcttcagggacctgcggcagttcatcgacgagtatgtggaaacggtggacatgctcaagagtcacattaaagaggaactgatgcacggggaggaggctgatgctgtgtacgagtccatggcccacctttccacagacctgcttatgaaatgctcgctcaaccccggctgtgacgaggatctctatgagtccatggctgcctttgtcccagctgccactgaagacctctatgttgaaatgcttcaggccagtacatctaacccaatccctggagatggtttctctcgggccactaaggactctatgatccgcaagtttttagaaggcaacagcatgggaatgaccaatctggagagagatcagtgccatcttggtcaggaagaagatgtttatcacacggtggatgacgatgaggccttttctgtggacttggccagcaggccccctgtcccagtgcccagaccagagaccactgctcctggtgctcaccagctgcctgacaacgaaccatacatttttaaagtttttgcagaaaaaagtcaagagcggcctgggaatttctacgtttcctcagagagcatcaggaaagggccgcccgtcagaccatggagggacaggccccagtcaagtatatatgacccttttgcgggaatgaaaacgccaggccagcggcagcttatcaccctccaggagcaggtgaagctgggcattgtcaacgtggatgaggctgtgctccacttcaaagagtggcagctcaaccagaagaaacgatcggagtcctttcgtttccagcaggaaaatcttaaacggctaagagacagcatcacccgaagacagagagagaagcaaaaatcaggaaagcagacagacttggagatcacggtcccaattcggcactcacagcacctgcctgcaaaagtggagtttggagtctatgagagtggccccaggaaaagtgtcattccccctaggacggagctgagacgaggagactggaaaacagacagcacctccagcacagcaagtagcacaagtaaccgctccagcacccggagcctcctcagtgtgagcagcgggatggaaggggacaacgaggataatgaagtccctgaggttaccagaagtcgcagtccaggccccccacaagtggatgggacacccaccatgtccctcgagagaccccccagggtgcctccgagagctgcctcacagaggcctccgaccagggagaccttccatcctcctccacctgttccacccagaggacgctgattccacctcctaaaacctgcctacttcaggactttaagactcacagtcttcagcctgttaatgatgtcttcatgttgagttttatagcatgactgttgaccttaagatccattctcattgctgataatgctgcagccctgctggtttgggcttgcctcgaagattttattaaggcacaagcacagagtcagaaagctaaataaaaaaatgaaacttttttgagtaataaaaatgaaaagacgctgaaaaaaaaaaaaaaag

SEQ ID NO: 73 - DNA, 1005 bp, Homo sapiens
  CDS (79)..(909)
gggatacccacccgtccgcggacgcgggttaactgtaggttaaaatttctttaacttgcccaaaacgctgaaaagaaaatgtggggctgtaaaatgtgctttgggattctcggaaaaaaggagtgctatattaattcatgttttcaagaaataatgaagaaaacatcaatatatcacctaccatcatttcattacttgatggattcagaagctcaagaagacaccagagaagcctatgatgacaagcaggtggtcacagagatcatggcaagatgttttattccaactctgataacaactacttcctgggaaagttttcattttattggtcatgagattcgaattactgaggccatggattgttatggtgctgttgtttggccatcggcccttgttctatgctatttcctggaaacaaatgcaaagcagtataatatggttgacaaaaacgtgattgaaattggagctggaacagggctagtctccattgtggcaagtttacttggtgctcacgtgacggccacagatttacccgaattacttggaaacctgcaatataatatttcccgaaacaccaaaatgaaaagcaagcatttgcctcaggttaaagaactctcctggggagtagctttagatacaaacttccccaggtcttctaataattttgactatattttggcagcggatgtggtctacgctcatcctttcttggaagagctcctcattacctttgaccatctgtgcaaagaaaccaccatcatcctgtgggccatgaaattcaggttggagaaggaaaataaatttgtagatagatttaaggagttgtttgacctggaggaaatttccagtttccctagcctgaatattaagttgtataaagctgtgaagaaaaaccggaggagcgtatgacatcctcgatgaggatgtggaaatgctaaggcaatttttagcaaataatcactttaaagaaaaccctgaataactttatgtgccactgagtttccc

SEQ ID NO: 74 - DNA, 714 bp, Homo sapiens
  CDS (1)..(714)
atgtcgagcaaaaaggcaaagaccaagaccaccaagaagcgccctcagcgtgcaacatccaatgtgtttgccatgtttgaccagtcacagattcaggagttcaaagaggccttcaacatgattgatcagaacagagatggcttcatcgacaaggaagatttgcatgatatgcttgcttctctagggaagaatcccactgatgcataccttgatgccatgatgaatgaggccccagggcccatcaatttcaccatgttcctgaccatgtttggtgagaagttaaatggcacagatcctgaagatgtcatcagaaacgcctttgcttgctttgatgaagaagcaacaggcaccattcaggaagattacctaagagagctgctgacaaccatgggggatcggtttacagatgaggaagtggatgagctgtacagagaagcacctattgacaaaaaggggaatttcaattacatcgagttcacacgcatcctgaaacatggagccaagacaaagatgactgaaagaactttagctaaaatcttccagttacattgtcttactctcttttacttctcagacacttcccccaccctcatagaacctgttgcatgcaacttagtttcacagctttgcctcttctttttgatgtatttattccagacctttctgccacttagcacttgtataatcagactggaaatggggatgagggtgtaa

SEQ ID NO: 75 - DNA, 979 bp, Homo sapiens
  CDS (90)..(572)
cccaggcttctggtggaggaagagaaggcaccgtcagcagccacaaggataccctgtgttccctggggggtggagcatgggtgcctctcatggagggctggggcggtggaggcacgcacaggtgtgtaagcgagcgaagtcctctgagggcattcttagagatggagccaatctcattgtcctcgatgaagggcgggctccccgggcccccattggctgcaggcccccccacgccagggctccccccagctcccccccacatcggtccgtcctgcttccagctgctgcagcgcgccttcgccgccaaagcatccagcagccccctgctccggcccagcatggcgaccccgacccagacccccacaaaggctcctgaggaacctgacccattttactatgactacaacacggtgcagactgtgggcatgactctggcaaccatcttgttcctgctgggtatcctcatcgtcatcagcaagaaggtgaagtgcaggaaggcggactccagcccaacctgcaaatcctgtaagtctgagcttccctcttcagcccctggtggcggcggcgtgtaacaccttcccgaggaaactccgctgccgaccctgcctgagcgcgggagcctgaggaccgggtggaggcggtggggacccagccgcgcgccgggagcgctccccggaatgagccgccccacccaccccaaggctggagccgctgcaccctgctgtccctctccaggccttggcaatgacgatcccccaaagagcccgtctgcaccccagacccagggcctcaggcctccagctcctgggatccgggagtccatcccggcccagcacccccagcatccccgtgtatggcccccctgcacctccttgtctcatccccgaagatccgtccccctggcccctcagtgtccatgtcttgagcttaataaatgtgcatttggttttttcctcaaaaaaaaaaaaaaaaaacctat

SEQ ID NO: 76 - DNA, 1364 bp, Homo sapiens
  CDS (111)..(1364)
aggtgggaaggcagttatgacagttgagaagtagtagaagacacggaaggcacagaaggcagacttcgctcagcacaaagaagaattttctgataaccatactgggcaaaatgaactgggctgccttcggagggtctgaattcttcatcccagaaggcattcagatagattcgagatgcccactaagcagaaatatcacggaatggtaccattactatggcattgcagtgaaagaaagctcccaatattatgatgtgatgtattccaagaaaggagctgcctgggtgagtgagacgggcaagaaagaagtgagcaaacagacagtggcatattcaccccggtccaaactcggaacactgctgccagaatttcccaatgtcaaagatctaaatctgccagccagcctgcctgaggagaaggtttctacctttattatgatgtacagaacacactgtcagagaatactggacactgtaataagagccaactttgatgaggttcaaagtttccttctgcacttttggcaaggaatgccgccccacatgctgcctgtgctgggctcctccacggtggtgaacattgtcggcgtgtgtgactccatcctctacaaagctatctccggggtgctgatgcccactgtgctgcaggcattacctgacagcttaactcaggtgattcgaaagtttgccaagcaactggatgagtggctaaaagtggctctccacgacctcccagaaaacttgcgaaacatcaagttcgaatatgaggctctaagaggcaaagagagttctcccaaagctgcgccgccacacatctctaaatcatctctgccaggcatctcgaacaggatccacagtgcagacatcacgttccaaatgctggaagactggaggaacgtggacctgaacagcatcaccaagcaaaccctttacaccatggaagactctcgcgatgagcaccggaaactcatcacccaatacgtagctcttgttaaatacaactgcagtgatgcgtgtggggttctcctttgtttgacagtatatcaggagtttgaccatctcttggaggagcagtctcccatcgagtcctacattgagtggctggataccatggttgaccgctgtgttgtgaaggttggtggctgccaagagacaagggtccttgaagaaagtggcccagcagttcctcttgatgtggtcctgtttcggcacaagggtgatccgggacatgaccttgcacagcgcccccagcttcgtctttctgtatctccttttcattttcctgtcttcatcgatattcactatcctcatcgctgcgacactctggcaatgaactgtttactgcccaataatcttaatgattaa

SEQ ID NO: 77 - DNA, 1729 bp, Homo sapiens
  CDS (7)..(1083)
tttgagatgggcggttccgaaggaattgtggagtctatacaaattatgaaggaaggcaaagctactgctagcgaggctgttgattgcaagtggtacatccgagcacctccacggtccaagatttacttacgattcttggactatgagatgcagaattcaaatgagtgcaagaggaattttgtggctgtgtatgatggaagcagttccgtggaggatttgaaagctaagttctgtagcactgtggctaatgatgtcatgctacgcacgggtcttggggtgatccgcatgtgggcagatgagggcagtcgaaacagccgatttcagatgctcttcacatcctttcaagaacctccttgtgaaggcaacacattcttctgccatagtaacatgtgtattaataatactttggtctgcaatggactccaaaactgtgtgtatccttgggatgaaaatcactgtaaagagaagaggaaaaccagcctgctggaccagctgaccaacaccagtgggactgtcattggcgtgacttcctgcatcgggatcatcctcattatcatctctgtcatcgtacagatcaaacagcctcgtaaaaagtatgtccaaaggaaatcagactttgaccagacagttttccaggaggtatttgaacctcctcattatgagttatgcactctcagagggacaggagctacagctgactttgcagatgtggcagatgactttgaaaattaccataaactgcggaggtcatcttccaaatgcattcatgaccatcactgtggatcacagctgtccagcactaaaggcagccgcagtaacctcagcacaagagatgcttctatcttgacagagatgcccacacagccaggaaaacccctcatcccacccatgaacagaagaaatatccttgtcatgaaacacaactactcgcaagatgctgcagatgcctgtgacatagatgaaatcgaagaggtgccgaccaccagtcacaggctgtccagacacgataaagccgtccagcggttctgcctcattgggtctctaagcaaacatgaatctgaatacaacacaactagggtctagaaagaaaattcaagagaagaactatttatacaaacatggggactgtgaaaagaaaattctatagtgaattgtgaaaaagtggacatatttctaaattcattccactgcctttatccaaacttaagaattacagacatttgttattccttcggcaagacatccccgctgcacactgatatgttcatttcgtaatttggttgctggccaccaagtgctccttagtttttaaatacattttgagattaactggaaacttgaagaagaaattagttcccgattaagactatcccaactttatttttattgtcagtttcacttttgtttctatgttgttttatgtctttgttatataattgtacattgtgtgatatgtgaaaaaaaaacacgaattggatgaaccttgtgttacatgtacatgtcccttatatacaccgttgagaatagtgcgttcctgaatgatttgaacatgcaccgtgcacgtgccgcgtggcggatcccacttaaggttggcaaacacccattttattgttatccggaagccgtaatccactgccacacaccctcggccaaacaaaaaaagggcgcaacaacggcgccaaaagacaccaacgggtgggcaacgggcgaagtgtatgacccacccaca

SEQ ID NO: 78 - DNA, 1347 bp, Homo sapiens
  CDS (552)..(1088)
  misc_feature (1)...(1347): n = a,t,c or g
ccgtgggttcacagtctggtcctgggggttttgcttgggttgggctccagctcacaccctccctaaaaggaaatgggagaaaggcccggccaaacaagagggttaaggttagagaagggggacacaaatgtcttcaggcttaggtccctgggggctcccagtcctgcccctgttcctctactcacatcccagctcctcccagtttcttttcggacctcctcctctccccttccttctctattccaggctgggttgggctttaagcaaggggagggattagagcctccttcctctctgcccctccccatgggtctctagggggctggtgcaggcagcagcagaggcactctgggcagctgggtgagggcccatctgggcaaggcccccagcgcctgccttctctcccggggccctgtgggcaagcctcctgcttcactttcaggtttctcgaagtgccttcttgctcctgtctgtttccccatcctgccagatttctgtttctcttgctgggcttttggcagtagggggctgtgttggtgggccctacgaagatgctcagtgctcgagatcgccgggaccggcaccctgaggagggggtagttgcagagctccagggcttcgcggtggacaaggccttcctcacctcccacaagggcatcctgctggaaaccgagctggccctgaccctcatcatcttcatctgcttcacggcctccatctctgcctacatggccgcggcgctactggagttcttcatcacacttgccttcctcttcctctatgccacccagtactaccagcgcttcgaccgaattaactggccctgtctggacttcctgcgctgtgtcagtgccatcatcatcttcctggtggtctcctttgcagctgtgacctcccgggacggagctgccattgctgcttttgtttttggcatcatcctggtttccatctttgcctatgatgccttcaagatctaccggactgagatggcacccggggcagccagggggaccagcagtgactctggggctaactggctcctaagcccagcagcagagaggaaagtggagcccagacacgtctcttgattattatagcccagcgctaaacccaaccaagcctaaagnagttggctggagtactgggaattatcttggagctgtgtcaggattggtatcatgaatttgcaagagggacatggggggggggagggagaaattgacctagctcccataattattaaaaaaaggggcctaatctcaggccataccacttttaaggctaataggttaataagggaaaggaaaagttgactgttagacaaccagatttttgttatatatccgc

SEQ ID NO: 79 - DNA, 476 bp, Homo sapiens
  CDS (11)..(334)
agctgagggcatggcgtccggagcggctcgctggctagtattggcacccgacaggtccggggctctccagaccggacctagcttgaggaaacacggcgatgtctccgccgcatggagcggctcaagccggagcctggtacctgtgaggtcatacatagttacccgcagcggcgccattttgcccaaaccggggaaaacggacatcggccttctccgtgtgttctccattgtgatcccctttctctatgtcgggacactcattagcaagaactttgctgctctacttgaggaacatgacatttttgttccagaggatgatgatgatgatgactaacaggtaagacttgctttaccctagatggagcaggaagcagggtggagcatctgtctgtgatgcagtctggcctggtagcagcatttggacactgggggcagaagcattaatgaattggcccacttggtggctaatgttttcg

SEQ ID NO: 80 - DNA, 1087 bp, Homo sapiens
  CDS (38)..(1087)
ccctagtgccccagcaagggttcttaaccaggctgaaatggctgaaatgacagaagtagaattcagaatatggataggaacaaaaatcatcaagattcaagagaaagtcaaaacccaatccaaggaatctaaggaataccataaaatgatacaagagctgaaagatgaaatggccattttaagaaagaaccaaactgatctgatagagctcaaaaactcactatatgaatttcataatacaatcacaagcgttagcagcagaatagaccaaactgaggaaagaatctctgagcttgaagactggttctccaaagttcttgccatgggtgacaagggaacaggcaaccattcagatgtaactgatttcattcttgaaggcttcagggtccgcccagagttctacattctcctcttcttcctgttcctgctgatctatagcatggttcttttggggaacattagtgtgatgacaatcattgtaactgattcccagctgaacacaccaatgtatttttttctaggcaacctctccttcattgacgtctcctactccactgttattgctcctaaagccatggcccacttcctgtctgaaaaaaagacagtctcttttgcaggttgtgttgcccagttattcctttttgccctgttcattgtaacagaggggtttgtcctggcagccatggcctatgaccgcttcagtgccatctgcaatcctcttcttcatagtgttcacatgtcaagacgcctctgcactcagttggttgctggttcttatttctgtggctgggccagttccatcctccaagtcagtgtaacattctcagtgtccttctgtgcttccagagtcattgctcacttctactgtgattcttatcaaattgaaaagatttcctgttctaatctctttgtcaataagatggtatctctgagtttgagtgtcatcattattttgcctacaattgttgttattatagtatcttacctgtatattgtatcctcagtcttgaagatcccctccagtgaagggagaaagaaagacttttccacttgcagctcccatcggggtgttgtaagtttgctctaa

SEQ ID NO: 81 - DNA, 1155 bp, Homo sapiens
  CDS (1)..(1155)
atgctgacgtcaatggcctatgattgctgtgtggccatctgttacccgcttctgtataacattgccatgtcccctaaagtgtgttccagccatatgcttggttcctacttctggcccttttctggggccatggcccataccaggtgcatgctgaaactgacctcctgtgaggcaaacaccatcaatcactacttccgtgacacccttcatgtgttccagctctcctgcaccagcacctacatcagggctgagtttatcctggcaggcttgacacaacgcccagaacttcaactgccactcttcctcctgttccttggaatatatgtggtcacagtggtggggaacctgggcatgatcttcttaattgctctcagttctcaactttaccctccagtgtattattttctcagtcatttgtctttcattgatctctgctactcctctgtcattacccctaagatgctggtgaactttgttccagaggagaacattatctcctttctggaatgcattactcaactttatttcttccttatttttgtaattgcagaaggctaccttctgacagccatggaatatgaccgttatgttgctatctgtcgcccactgctttacaatattgtcatgtcccacagggtctgttccataatgatggctgtggtatactcactgggttttctgtgggccacagtccatactacccgcatgtcagtgttgtcattctgtaggtctcatacggtcagtcattatttttgtgatattctccccttattgactctgtcttgctccagcacccacatcaatgagattctgctgttcattattggaggagttaataccttagcaactacactggcggtccttatctcttatgctttcattttctctagtatccttggtattcattccactgaggggcaatccaaagcctttggcacttgtagctcccatctcttggctgtgggcatcttttttgggtctataacattcatgtatttcaagcccccttccagcactactatggaaaaagagaaggtgtcttctgtgttctacatcacaataatccccatgctgaatcctctaatctatagcctgaggaacaaggatgtgaaaaatgcactgaagaagatgactaggggaaggcagtcatcctga

SEQ ID NO: 82 - DNA, 369 bp, Homo sapiens
  CDS (1)..(369)
atgaacccatcagagatgcaaagaaaagtgcctccgcagagacagaaaacctgcaatcgagcatcatcgactcgccaggtgaacaaaatggtgatatcagaagaacagatgaagttgccatccacaaaggaagcggagctgccgacctgggcccaactaaagaagctgacacagttagctgaaaaaagcctgaagaaaacaagggtaacacaaactccagagaatatgctgcttgcagttttgatgattgtatctaccgtggtaagtctccccatgtctgcaggagcagctgcagctaattatacttactgggcctatgtgcctttcctgctcttaatttgggcagtcatatggatggataatcattga

SEQ ID NO: 83 - DNA, 1621 bp, Homo sapiens
  CDS (46)..(351)
cgagcccagctccgccgccgagcgctgtgccggcacggctacaccatggagcgcccggataaggcggcgctgaacgcactgcagcctcctgagttcagaaatgaaagctcattagcatctacactgaagacgctcctgttcttcacagctttaatgatcactgttcctattgggttatatttcacaactaaatcttacatatttgaaggcgcccttgggatgtccaatagggacagctatttttacgctgctattgttgcagtggtcgccgtccatgtggtgctggccctctttgtgtatgtggcctggaatgaaggctcacgacagtggcgtgaaggcaaacaggattaaagtgaacatcacctttttatagcattaaattcattttttaaaatgataaatgctggagggggccatctgatttgaataaagttgaaagaacatgttaaagtcagtcttaaggagtcacgtttgagtatgtaaattttgatctttctaatatgttggtttgtatattcagttttaactgtatgaatctgatttgcaaatgagaatttggaaaagttaaattagttacaaagaaatatgttaatttaattagacaatactctggaaggaattttatcttctttcaacaaaacatgttttatagtattctgacttacggttgcttttgagttttactcatttggatatattaagatgcacacagtgaagcaaattaaactccactttacgctggaatgctttctttagcatgaaaataccaggtccttggatttgggattttaatttcctatggaaagttgcttaaattgtggacactggaattaatctgaatgtcactgaggaatttcacatgaagtgtaatccctagtcaataagaattatccattacattattttatgggaaaactaggctaaattacatccattcaggtaaaaggaccttagcttactgaaggatctaaagagcaaagcaaagatctcactactcaaacactcagcctgcttccttcaagtccccttgcaggccagctttgtgctttgcagaccaactttttaatgagatactttgcttcctcattcaacattgaagctaggcttcaattaaaaggttcgaggaagctccatttaaaattgttttttttactattttttaaaattgtagtgtatatgataggaatttgcatttaaatatgttcatttttgcatatgttaggagtggaaacaatctggaaaacatttttttttcatccaaaaagtattctccttgggcatatctgatggaaaaaaaccttgattttattttcgtatctttagtctgtgttctttctagttatttggtactaattatgtgcaatctaaaaacactcccacaagtatttgttttttaattataaaatcatagtatatgttctttgtagaaaactggaaaaatacatattcaaacaggaaaaaaaatcaaaattccccataatgttgccatctaaaaataacctctattttagttgatatcccgtattcatttttgaaagccattccttaatgctagtttgatacacactaaaagtttagcttacaagttcaaattctgccagcttttcctgacagctatttg

SEQ ID NO: 84 - DNA, 5847 bp, Homo sapiens
  CDS (1)..(4725)
atggtggaagcaaagggcaaagctaggaaaccacatggtccgtggggaaggtgtacaggagactgtggtcccggaggagtccagagtcgggcagtgtggtgttttcatgttgacgggtggacaagtcacctgtctaactgtggtgagagcaacaggcctccaaaggaaagaagttgtttccgagtttgtgactggcacagtgacctctttcagtgggaggtttctgactggcaccactgtgtgcttgttccttacgctcgcggtgaagtcaagcctcggactgcagagtgtgtgacggctcagcatggactgcagcaccggatggtgcgctgcattcagaagctgaaccgaactgtggttgcaaatgaaatatgcgaacactttgcccttcagcctcctacagaacaggcttgcctcattccttgtccccgggattgtgtagtatctgagttcttaccatggtccaactgtagcaagggatgtgggaagaaattgcagcatagaactcgcgcggtcatagctccccctctctttggtggtttgcaatgtccaaatctgactgagtcaagagcctgtgatgctcccatttcctgtcctcttggggaagaggaatatacatttagccttaaggttggaccatggagtaaatgcagactgcctcatcttaaagaaattaatccaagcggaagaactgttctggattttaactctgattcaaatgagcgagtcacctttaaacatcaaagttacaaagcacatcatcattcgaagtcttgggcaatagagataggttatcaaacccggcaggtttcgtgtacaagaagtgatggacaaaatgctatgttaagcctttgccttcaagattccttcccattgactgttcagtcctgcatcatgcccaaagactgtgaaacctcccagtggtcctcctggagcccctgctccaagacatgccgttcagggagtctcttgccaggatttaggagcaggagccggaacgtgaagcacatggctattggaggtggaaaggagtgtcctgaacttcttgagaaagaggcctgcattgttgaaggagaacttctgcagcaatgtcccaggtattcctggagaacttctgaatggaaagaatgccaagtctctctcctcctcgagcagcaggatccccactggcatgtgacgggacccgtgtgtggcggtgggatccagacccgggaggtgtactgtgcccagagcgtaccagcagctgccgcactgagggccaaggaagtctctagacctgtggaaaaggcattatgtgtgggacccgccccgttgccctctcagctctgcaatatcccttgctctacggactgcatagtatcttcctggtcagcctggggcctgtgcatccatgaaaactgtcatgaacctcaggggaaaaaaggatttagaacgaggcagcgccatgtcctcatggaatctacagggcctgcagggcattgccctcatttggtggagtctgttccttgtgaggatccaatgtgctaccgatggctggcatcagaagggatctgtttccctgatcatggaaaatgtggcctgggacatcgtattctgaaggccgtctgccagaatgaccgcggagaagatgtatcagggagtctttgcccagttccccctcctcctgagaggaagtcttgtgaaattccctgccgaatggactgtgtgctgagcgagtggacggagtggtcatcctgttcccagtcctgttcaaataaaaactcagatgggaaacagaccaggtcaagaactatcctggcactggctggggaaggtggaaagccatgtccccctagtcaggctctccaagagcatcgtttgtgtaatgaccattcctgtatgcagcttcactgggagacatcgccttggggcccttgttctgaggacacattggtaactgcccttaatgcaaccattggctggaatggagaagccacgtgtggtgtaggcattcagactcggagagtcttctgtgtcaagagtcacgtgggacaagtaatgaccaaaagatgtccagattctactcgacctgaaactgtgcgcccctgttttctcccatgcaaaaaagactgtattgtgactgctttcagtgagtggacaccctgcccaaggatgtgccaagcaggaaatgccacagtaaaacagtctcgatacagaatcatcatccaagaagcagccaatggaggccaggaatgcccagataccttatatgaggagagagagtgtgaagatgtttccttgtgtcctgtatatcggtggaagccacagaaatggagcccttgcatcttagtgccagagtctgtctggcagggaataacgggcagcagtgaagcctgtggaaaggggttacaaacaagagctgtctcatgcatctctgatgacaaccggtcagcagaaatgatggaatgcctcaagcagacaaacggcatgcctctccttgtgcaagaatgcacagtcccatgtcgagaagactgcaccttcactgcttggtccaagtttacgccctgctccacgaactgtgaagccacaaaaagtaggcggcgacagctcacagggaaaagcagaaagaaggagaaatgccaggattctgacctttaccctctagtggagacagaactatgtccttgtgatgaatttatatcccaaccttatggaaactggtcagattgcattcttccagaaggcagaagggagcctcaccgaggactgcgggtacaagcagacagcaaagaatgtggagaaggcctgcgctttcgagcagtagcctgttctgataaaaatggaagacctgttgacccctccttctgcagcagctctggttacattcaagaaaaatgtgtcattccctgcccatttgattgcaagttaagcgattggtctagttgggggtcttgcagttcatcttgtggaattggagtgagaattcgatccaaatggctaaaagaaaaaccttacaatggaggacgaccatgtcccaaactggatctcaagaatcaggctcaggtacatgaggcagtcccatgttacagtgagtgcaatcagtattcctgggttgtagaacactggtcttcatgcaaaatcaacaatgagctgaggtccctgcgctgtggaggaggaacacaatctaggaaaatcagatgtgtgaatactgcggatggtgaaggtggagcagtggatagcaacctgtgcaaccaggatgaaattcccccagaaacccagtcctgttctcttatgtgtcccaatgagtgtgtcatgtctgagtggggactttggagcaaatgcccacagtcatgcgatccccacacaatgcagagaagaactcgccacctgctaagaccatcactgaactcaaggacttgtgctgaagactcacaggtgcagccttgcctcctgaatgaaaattgcttccagttccagtacaatctaacagagtggagcacatgccagctgagtgaaaacgcaccctgtggtcaaggcgtcaggacccgcctgctaagctgtgtgtgcagtgatggcaagccagtcagcatggaccaatgtgagcagcataatttggagaagccccagagaatgagcattccctgcttggtggaatgcgtggtcaactgtcagctctcagggtggacggcttggacagagtgttcacagacctgtggccatggaggtcgaatgagccggactcgatttatcattatgccaacccaaggagaaggacggccatgccccacagagcttacccaggagaaaacctgcccagtgaccccctgctacagctgggtccttggcaactggtctgcatgtaaattggagggtggagactgtggggaaggagttcagatccgcagcctttcctgcatggtccacagtggttcaatatctcatgcagctggacgtgtcgaggatgcactgtgtggagaaatgccctttcaggacagcatcctgaagcagctgtgttctgtgccttgcccaggagactgccatttaacagaatggtcagagtggagcacatgtgaattaacctgcattgatggaagaagctttgagactgtgggccgccagtctagatcaaggacttttataattcagtcttttgagaaccaagacagctgcccccaacaggttctagaaacacgcccttgtacaggaggcaaatgttatcactacacatggaaagcaagtctttggaacaataacgaacgaactgtatggtgccagcgttcagatggcgttaatgtcacaggaggctgctcccctcaggcccgtcctgctgccattcggcagtgcattccagcctgcagaaaacctttctcctactgtacacagggtggagtctgtggttgtgagaagggctatacagagataatgagatcaaatggtttcctggattactgcatgaaagtaccaggctcagaggataaaaaagctgatgtgaaaaacctttctgggaaaaacagacctgtgaattcaaaaatacatgatatttttaaaggatggtctcttcaaccacttgatccagatggccgagtaaaaatttgggtttatggcgtttcaggtggcgcttttctcatcatgattttcctaatatttacttcctaccttgtttgcaagaagccaaaaccacatcaaagcacacctccccaacagaagcctctgaccttagcctacgatggagacttagacatgtaatctgaaaaagaaatccaaatgtagacatcaactgccttaaccgctttctcttttgtagctctcagacttctcagttttttgaggaatctcaagatgtgatatattgggcagaatacaaatattgcaaaagtaatattgcctcaacttcatttggacatggagtcaaggattattaggtctgccattttgttttcaagttgtttgtgggtgtgttttatttttttggttttcccaagggacctgaaaacccttctcttcctgtttggaactgggaggaagaaaacatgatggaattcccacagacttgagtaaacttgatcttcagcagcataatgacaatccagaggaaaatacagtcaaggcatttactctaaatgacgagtctgacactgcattgttacgcactatattagtgcaaagtctttattcttcccatacttcaacactgagttttctagagtttactttggtttaaagactttcaaatcggattgcctatttttcatgaacacagagagaatggattaccatttcagaaattctctgagtttttaacctttaaatattgtattttgttttgtagccaggggatgatggcgcttcatgggttgcagctactgaaaatagcagcgtgtgtgtaattgctggactagatgaaagctaggtcatttctgaagggaatgtgtactgaatgttagagtgtacaaatgaaatatgtggttaaattggagaatgaggtagattatttgattactaaaactgtattttaacaaaaacttatccatgtagatatagcattaaccacacacagttgtaattcagtttaatgatgacaaactctgcttttgtaatttcaattttcttatctgaatatttataaattcttctttcaaatttaattatctgacctcatttaatatacatcaaacaccgatcctgtttgtacaaagtcttgcttttataaggtttcaataatatctaaaacaacacattaaaaagctgagaccattttatgaagataattgtttgtaatcataggtgttgaaagtaaaaaggtgccatcttgtggtattgacttgtatttataacaaataaactgctcaagagacaaaaaaaaaaaaa

SEQ ID NO: 85 - DNA, 1231 bp, Homo sapiens
  CDS (194)..(1231)
ctgtcttcttctttgccttccaagacaccaagctgttcccacccaaggtcctggcacttactctccctgcacctcacaccagccccacatcttcccaaggccagctgctccccatcacctgggtctcctccaaaacccgcacaatgctgcatcctgcatccagtgcctatatcccgctggggtggccaccaccatgcccaagagaaaggctgaaggggatgctaagggagataaagcaaaggtgaaggacgaaccacagagaagatccgcgaggttgtctgctaaacctgctcctccaaagccagagcccaagcctaaaaaggcccctgcaaagaaggccaaagggaaaaagggaaaagctgatgctggcaaggaggggaataaccctgcagaaaatggagatgccaaaacagaccaggcacagaaagctgaaggtgctggagatgccaaaagtcctgaggaagaaagtacctcaaatgaacagggagggcatcatcagtcacagagcagcctgggcaacaccaagaccagacagaaaccctttccaagcaacagagtggaaacaccaacaaacccttttcatgagacacacatttctgcaagacctatcttgacagaagccaccaggtcccaaacatgtcacatgtatgaaaaattcaaattcaaacgtggagaagagcagttttatgggacccgccttcaggtgatggatacaaagtttagagaaaatgaagagctagaaaggtgcagtgccatgactcaaaatgggccttctaatcacaccaagtctaacacacagcaactagagacccctagcccccaattttcagtgtttttcttagattggtttttgattcacgcttctcaaatttgtaaaatcataaggagaataaaatacatcttaaaaactaaaagtaagaaagttataaagaaggattcagcagcatcagaagagatcttaaatgtgcagagggaaaaactgtcagtcagacagcccatgagccgtccttggtatgtcagtattttttttttaggagatgaggaagccagtccagtatctaagaacttgctcaaggtcacactgccagaaggtggcagagcaagttggtgtgacacccttattggtacccaagccataccggttcttatagctccccagaatcaagccctcttcgttctggcatgtggagaagctccaccctatttccctaaaggaaatcctgccaactga

SEQ ID NO: 86 - DNA, 753 bp, Homo sapiens
  CDS (206)..(559)
agcgctgagcatacaaaggctaagaagggcagatctgatctgatctgagccaagaagcgatggctcctaagaaaataacctaccagcatctcagaaactccctttgtcttcccatgtttgaggttctacccaggaagcaggcaccaaatggaaatatctgaaaccatcccagcaacccaaccacagctggttctccctggagaccatgaaccacactgtccaaaccctcttcactcctgccaacaccggccgctccaccaaccatgagatgctcaaggagaagcatgaggtggctgtgctgggggcaccccacaaccctgtgcctccagcgttcaccatgatccacatctgcagtgagacctccgtgcccgaccatgtcgtctggtccctattcaacaccctcttcaagaattcctgctgcccggacttcatagcattcatctactctgcctgtgtctccaccgccaagtgcctgaacatctgggccctgattttgggcatcctcatgaccattctgctcatcatcatcccagtgttggtcgtccaggcccagcgatagatcaggaggcatcattgaggccaggagctctgcccgtgacctgtatcccacgtactctatcttccattcctcgccctgcccccagagggccaggagctctggccttggactgtaatccactttattcaacttccaatcctcggcctgttcccaaagccgagttctggattagccctttatcctcaaacgctttt

SEQ ID NO: 87 - DNA, 2494 bp, Homo sapiens
  CDS (181)..(1989)
aggcctgagccggtgtgcgccacctgggctgcggcggcgacagcgacttctcctgacccctctgccaccctcccatccgtccgcgggtccgtggagctggagcagatcccccagccggctgagacaggttgtcttttggaaatgcaggtttaaggacaaattatctgcttaagctagaagatgggatcgaatagcagcagaatcggcgatcttcctaaaaatgagtacttgaaaaagttatcaggcacggaatctatctctgagaatgacccgttctggaatcagcttctctcattttctttccctgcaccaactagcagtagtgagttgaaactcttggaggaagcaaccatttcagtctgcaggtcattagttgaaaacaatcctcgaacaggaaatcttggtgcactaattaaggtcttcctttctagaaccaaagaactaaaactttcagcagaatgtcagaaccacatcttcatttggcagacacacaatgctttgtttattatttgctgtttgctgaaagtgttcatctgtcagatgtcagaggaggaattacaacttcattttacttatgaagaaaaatctcctggcaattacagttctgactcagaagatcttttggaagaattgctgtgctgtttgatgcagttgatcactgatattccactcttagatattacatatgaaatatcagtagaagctatatcaacaatggttgttttcctttcctgccaactcttccacaaagaagttttgcgacagagcatcagccacaagtatttgatgcgaggtccatgtcttccatacaccagcaaacttgtgaagaccttattatataactttatcagacaagaaaagccacctcctccaggggcccatgttttccctcagcagtcggatgggggaggactgctttatggacttgcatcaggagtagcaacaggactctggactgtcttcacactaggtggtgtgggcagcaaagcggctgcctctccagagctttcttcccctctggccaaccagagtctcctgcttctgctggtgttggccaatctgacagatgcctcagatgcgccaaacccctacagacaagccattatgtccttcaagaacacacaagatagcagtcctttcccctcatcaattccacatgccttccagatcaactttaatagtttgtacacagctctttgtgaacagcagacatctgatcaagcaactctcctcttgtataccttgctccatcaaaatagtaatattagaacatacatgttggctcgcacagatatggaaaatcttgttttaccaattcttgagattctgtatcatgttgaagaaaggaattcacaccatgtgtatatggcccttataatattgttgatccttacggaagatgatggcttcaacagatccattcatgaagtgatactaaaaaatattacttggtattcagaacgagttttaactgaaatctccttggggagtctcctgatcctggtggtaataagaaccattcaatacaacatgactaggacacgagacaagtaccttcacacaaattgtttggcagctttagcaaatatgtcggcacagtttcgttctctccatcagtatgctgcccagaggatcatcagtttattttctttgctgtctaaaaaacacaacaaagttctggaacaagccacacagtccttgagaggttcgctgagttctaatgatgttcctctaccagattatgcacaagacctaaatgtcattgaagaagtgattcgaatgatgttagagatcatcaactcctgcctgacaaattcccttcaccacaacccaaacttggtatacgccctgctttacaaacgcgatctctttgaacaatttcgaactcatccttcatttcaggatataatgcaaaatattgatctggtgagtgtaaatgaagacatttattatgattcttttttaagtattaaagcagagaatgtttaataagccttggtaagaactataatagtaagagtttcttctttcaacattaactgtatttgcagtctattttactataatagttgtggtaatctgtgtgtgtgttgtatatacacacacatacatatttaatacaattgaagtcatacttcatacagttttttattctgacttttttactttacacttagaccatgagcatttttctgtggtattatcaattctttgaaagtctcacattttaatttctatctagcccatgtttgtgtcctaaaatatatataactattatcccatttttgctcatttatttccagtattttatatcaattcataatgaatgaaaagtttataaataagtcttatctcaaattttaaaattatatttttgatatggttttaaagctggaattttactagtttttactgtcaaaagatatctttattttcaagattcaacacaggttgccaaattgctttccagaaaaactgtagaatttatgcctgt

SEQ ID NO: 88 - DNA, 690 bp, Homo sapiens
  CDS (1)..(690)
atggtgcccagagtccccggctctggctgggcccatagatttgctctctctcccaggctggttggtggaggcatcagagctagcttccgccgcagcctggcacctcaggtgccgaccttctacctgccctacttcctggaggccggcctggaggcggcagccttggtcttcctgctcctgacggcagattgctgtggacgccgccccgtgctgctgctgggcaccatggtcacaggcctggcatccctgctgctcctcgctggggcccagtatctgccaggctggactgtgctgttcctctctgtcctggggctcctggcctcccgggctgtgtccgcactcagcagcctcttcgcggccgaggtcttccccacggtgatcaggggggccgggctgggcctggtgctgggggccgggttcctgggccaggcagccggccccctggacaccctgcacggccggcagggcttcttcctgcaacaagtcgtcttcgcctcccttgctgtccttgccctgctgtgtgtcctgctgctgcctgagagccgaagccgggggctgccccagtcactgcaggacgccgaccgcctgcgccgctccccactcctgcggggccgcccccgccaggaccacctgcctctgctgccgccctccaactcctactgggccggccacacccccgagcagcactag

SEQ ID NO: 89 - DNA, 1501 bp, Homo sapiens
  CDS (1)..(1443)
atgaataaacaaagaggaacctactcagaagtgagtctggcccaggacccaaagaggcagcaaaggaaacttaagggcaataaaatctccatttcaggaaccaaacaggaaatattccaagtagaattaaaccttcaaaatgcttcttcggatcatcaagggaatgacaagacatatcactgcaaaggtttactgccacctccagagaagctcactgctgaggtcctaggaatcatttgcattgtcctgatggccactgtgttaaaaacaatagttcttattccttgtattggagtactggagcagaacaatttttccctgaatagaagaatgcagaaagagatgagtgaatttcataattataacttggatctgaagaagagtgatttttcaacacgatggcaaaagcaaagatgtccagtagtcaaaagcaaatgtagagaaaatgcatctccattttttttctgctgcttcatcgctgtagccatgggaatccgtttcattattatggtagcaatatggagtgctgtattcctaaactcattattcaaccaagaagttcaaattcccttgaccgaaagttactgtggcccatgtcctaaaaactggatatgttacaaaaataactgctaccaattttttgatgagagtaaaaactggtatgagagccaggcttcttgtatgtctcaaaatgccagccttctgaaagtatacagcaaagaggaccaggtccagcagacccggtcctattacaggagtttcggacactgcttagccaggaaggtgtcttcccctgtcacagcctgctacagctgcaaagctcgtcctatcagctgtatgcaatgtcctaggtctgatttccccccacactcgcctcagagcacacagcccgtgctaagggatctgtgcctccccacgtcactccctgcattggcctctcccgagaccatcgctttcacacactttcacacaccttccttgccccaggattcctcattggacgaaatgagcctctctcatgtcccggatccagtgaaccactttcactttgttagtggggacataagcttcatccaaattggcaggccactcctgctgcccccagccactctgggttggattagtggtcagtccctgggaggtgatcaagctcccctttgtccctatgggacgggctttcctgccttgggcctatactccttaccacagttcctgaagtgctggtatcgtcctgcagccccatcctcggttccattgcgctgccaggcagggtgctgggacgtggggagagctggtctatatatccgggtgaagctcagctgtggcacaccttggatgccgggtctctcctggccccggggacctagtatcgcaggcaaaggggacagtaaatctgtcatctccaatcctgatgagcccccagaaatgtatcgggatatataaggaatcagagagaccaagggattgaggaggatatttattatttaggtgcactggtccc

SEQ ID NO: 90 - DNA, 1396 bp, Homo sapiens
  CDS (1)..(1329)
atgcagacagacccacgagtaggcttttgcagagtccaggatgaaagcaaatctcctaggttggcattcgaggcccatcacaagcggctctcacaaccccctgccaatgatggacacttaatccagacagccaggagtggatatacagattcaggatacagaatcagagatttggacgaagattttggcactgccactcttggctgggcaggacaggaagtacagacagagaacgtgacagtggctgagggtggggtggctgagatcacctgccgtctgcaccagtatgatgggtccatagttgtcatccagaacccagcccggcagaccctcttcttcaatggcacccgtgccttgaaggatgagcgtttccagcttgaggagttctccccacgccgggtgcggatccggctctcagatgcccgcctggaggacgaggggggctatttctgccagctctacacagaagacacccaccaccagattgccacgctcacggtactagtggccccagagaatcctgtggtggaggtccgggagcaggcggtagagggcggcgaggtggagctcagctgcctcgttccgcggtcccgtccggctgccaccctgcgctggtaccgggaccgcaaggagctgaaagtgtctgaccggggtgtggcaggagtgagcagcagccaggaaaatggcaaggtctggagcgtggcaagcacagtacggtttcgtgtggaccgtaaggacgacggtggtatcatcatctgtgaggcgcagaaccaggcgctgccctccggacacagcaagcagacgcagtacgtgctggatgtgcagtactcccccacggcccggattcatgcctcccaagctgtggtgagggagggagacacgctggtgttgacgtgtgctgtcacggggaaccccaggccaaaccagatccgctggaaccgcgggaatgagtctttgccggagagggcggaggccgtgggagagacgctcacgctgccgggtctggtatccgcggataacggcacctacacttgcgaggcgtccaataagcacggccatgcgagggcgctctacgtacttgtggtctacgaccctggtgcggtggtagaggctcagacgtcggttccctatgccattgtgggcggtatcctggcgctgctggtgtttctgatcatatgtgtgctagtgggcatggtctggtgctcggtacggcagaagggttcctatctgacccacgaagccagtggcttggatgaacagggagaagtaagagaagccttcctcaatggcagcgacggacacaagaggaaagaggaattcttcatctgaccctatccccaccccaggcctaggcctgggcctgggctggggtcccccccactgccagctgcaagcc

SEQ ID NO: 91 - DNA, 6586 bp, Homo sapiens
  CDS (115)..(5070)
  misc_feature (1)...(6586): n = a,t,c or g
cgccgttgtgtttcatttattcttcgaactactataggtggtcttcttggagaaaaggctcagcttgctgctgtaaaggatatttgccaggccatctggaagctaaagaaagttatggatgccgtaatgagtgatggtaatttggaaacccggcttggttccacagatgtagccgctagccaacatatgctggtttgtgctttacaagaacttggaaatctcatacacaatcttggcaccacagcggcacctttgctacaggattcaagtacaggtctccttgacagtatcttgtcagttattcttcatcctagcatttctgttcgactagcagcagcttggtgtttacactgcattgccgtggcattaccctcctacctaacaccactcttggatcgttgccttgaacggcttactggacataagtcttcacctgaagcagtgactggcttcagttttgctgtagcagctttgttgggagcagtaaaacattgtcctttaggaattcctcatggaaaaggcaagattattatgacattagcagaggatttgctgtgttctgctgctcaaaacagtcgcctttcagctcagcgcacacaagctggatggttgctgatttctgctctgatgacattaggtcctgcagttgttagccatcaccttgctcgagttctgctgttgtggaagtgtgtctttccagcatctcctaaagatctagaaacagaaaagagccgaggagattcgtttacatggcaggtgaccctggaaggacgagctggtgcactgtgtgctatcaagagctttgtttcccactgtggtgatcttcttactgaggaagtaactcagcgtcttcttccaccacttccttgtgctgtggatttgctaactcagctttcttcaatactaaaaatgtatggaagtcctttgaaaacaccgtcagtggtttatagacaaagactttatgaactgttgattttattacctcctgagacctatgaaggaaacctctgtgctatcctcagagagctggctgctgacttgactgcccctgatattcaggtggcagcatctacatttttacttccacccctctgtcatcaggatgatcttttgatactaagtcctttcctacaagagactgaccatagatttattgaagaacagctcctgcttggtaatggtgttgcttgcggaagtcttgaatatgacccttattcgatttatgagaaagatgtagagggagattcagtgcctaagcccttacctccagcactatcagttattagttctgcatccaagctctttggggttgtatgcgctcatgtgggagaaactcaaaggcttcttatactggaacagcttttggacagtataaagcacacaaaaggagctcgtcagcaagtggttcagttacatgttgtttcttcagtttctagtttcttgaagtacgtggctggctccaagggatgtttaggtccagaagaaatgaaaagatttgccttaacattagttatgggagccctagaaagccccaaccccttgctgagatgtgcagctgcagagtcatgggctagattagcccaaatggtagatgatggagcttttactgctggattagctcaagttagctttgacaaattgaaatcagcaagggatgtggttaccagaacaggacactcattggccttggggtccctacataggtatttaggaggaataagttcttctcaacacctaaattcttgtattggaatcctttatactttggcgcaggacagcacttctcctgatgtgcagacctgggcattacattctctatcattgatcattgattctgctggcccactctattatgtgcatgtggaacctaccctttctcttattataatgttgttgttaaatgtgcctcctactcatgctgaagttcaccaaagccttggtcgctgtttgaatgcccttattaccacgttaggtccagagctacaaggtaacagtacttcaatttctaccttaaggacttcctgtctactgggttgtgcagtaatgcaagataacccagactgccttgttcaagctcaggccatctcttgccttcagcagcttcatatgtttgctccacgacatgtcaacttgtctagcctggttagctgcctctgtgtgaatctttgtagcccctacttgttactgagaagagcagtactggcttgcttacgtcagcttgtacaaagagaagcagctgaagtttcagaacatgctgttatgcttgctaaggatagcagagaagagttgactccagatgctaacatcagagaagttggccttgagggggcattgttgatcttactagacaaggagacagatgagagattatgccatgatatcaaagagactttaaattatatgcttacatctatggcagtggaaaaactctccctgtggttaaagctttgtaaagatgtacttgctgcatcagctgattttacagctgtaacttgtgtggatacaatgcaagaagaagaaggagataaaggggatgatgcctcagtcctgaccaccagacgtgatgaaaaatcccatccttttaccaatccccgatgggctactagagtctttgctgctgaatgtgtctgtaggataattaaccaatgtgagaatgctaacagtgcacattttgacattgctttagcacaagaaatgaaaaaaagagattcaagaaatgactttttggtactgcatcttgctgacttaattcgcatggcttttatggctgccacagatcacagtgaccagctccgtctttctggccttgaaatgctgttagttgttattcggcgatttgcaactgttccagaaccagagtttccaggtcatgtgattctggaacagtatcaagccaatgtaggagcagcgcttagaccagccttcacttcagagacaccacctgatgtcactgccaaagcatgtcaggtttgcagtgcctggatagcaagtggagttgtaagtgaccttaatgatctccgaagagttcatcagttgcttgtttcatcgttaactaaaatacaggctggaaaagaagctctaagtcacttatataatgaaagtgcttctaccatggagatcttagctgtgcttaaagcctgggcagaggtctacataattgctgtgcaaagacataaaaaccacagacaacctttgaagactaccacctgtttagaagacggtatcagaaatggatcatgttcatcagatggactgcttgacttagtctatgcagatcttggcacactaagcagactctggcttgctgcacttcaggattttgctcttttaactttgccttcagaatttgcctcccaacttcctgctgaaggtggtgctttctacacagcagagactagtgaaaatgcaaaattgcattattacaactcctgggcacttatcctccatgctacagcattgtggcttacaagcacgggttttgttgttgctgacccagatgaaggagcatctaatctctccaggcctgtaacaccaacttccatgtgtcagggttcatcatctggggctaccataaagtcccctgaggatgtctacactgatagattccatcttattttaggaatcagcgtggaatttctatgttccttacgttcagatgcaaccatggaaagcataactgcttgtttacatgcattgcaagcacttctagatgtaccttggcccagatcaaaaattggcagtgatcaggacttgggtatagaattgctgaatgttctacatcgagtaattttaaccagagaatcaccttccattcagttggcttcacttgaagtggtaaggcagattatctgtgctgctcaagaacatgtgaaggaaaaaagacgaagtgcagaagttgatgatggggctgctgaaaaggaaactctgccagagtttggagagggaaaggacaccggaggacttgtgcctggaaagtctttggtctttgcaacactggaattgtgtgtatgcattctagttagacagctcccagaattaaaccctaaattgacaggtagcccaggagtaaaagctacgaagccacagatactattagaagatggaagtagattggtttcagctgcattggttatcctttccgaacttcctgcagtgtgctctcctgaaggaagcatctcaattctccctactatattgtacctcacaatcggggtcctcagagagactgctgtgaagttacctgggggccagttatcttcgacagttgcagcttccctacaggctctaaaaggaatattatcttctcccatggcccgggcagaaaagagccgtactgcttggactgaccttctccgaagtgccttaacaacaattcttgactgttgggatccagttgatgaaacacaccaagaacttgatgaagtcagtctacttactgctatcacagtgtttattttgtctaccagtccagaagtaactaccatcccatgccttcagaagcgctgtattgataaatttaaagctactcttgagataaaagatcctgtggtacaaatcaagacctaccagctcctacattccatctttcagtatccaaatccagctgtttcctacccatacatttactctttagcatcctgtatcatggaaaaactgcaggaaatagacaagagaaaacctgaaaacactgctgagcttgagatcttccaagaaggcataaaggtcttagaaacactggttactgttgctgaagaacaccatcgcgctcagctggtggcctgtcttttgcccatcctcatttccttccttttggatgaaaattctctgggatcagcaacttccataatgagaaatttacatgactttgctctacaaaatctcatgcaaattggacctcagtattcatctgtttttaaaagtttagtggcttcttctccagccctaaaagcccgccttgaggctgctataaagggcaatcaggaaagtgtcaaagtcaagataccaacatctaaatatactaagagtcctggaaaaaactcaagcatccaattaaagaccagtttcctctgattttttttttggaatagtaagcaccttaatataataaatacttgatcattgcctttggtgacaaaagggacattgtagacacaagtgcccttagaggtctagttgattgttttaccttaaatagctgtgactcttcaaagtaacagcatacttaacatttttgtgtgtgtgcgtggggtttgtgttttgttttgttttgtttttctatttaaaaagacaatggagctaacttgccaggaattttaagaaagtgctaaagaactaaacttactaaacaatccactgctttaaaaatgaaatgaatttcttctaacagtccatacatatgtggtatacttaatactgtgacagatataaatatgactctagtgtaaattatctgcactaatattgtatcccaattgctgatttnnnnnnnnnnnnnnnnnnnnnnnnnnnnnnnnnnnnnnnnnnnnnnnnnnnnnnnnnnnnnnnnnnnnnnnnnnnnnnnnnnnnnnnnnnnnnnnnnnnnnnnnnnnnnnnnnnnnnnnnnnnnnnnnnnnnnnnnnnnnnnnnnnnnnnnnnnnnnnnnnnnnnnnnnnnnnnnnnnnnnnnnnnnnnnnnnnnnnnnnnnnnnnnnnnnnnnnnnnnnnnnnnnnnnnnnnnnnnnnnnnnnnnnnnnnnnnnnnnnnnnnnnnnnnnnnnnnnnnnnnnnnnnnnnnnnnnnnnnnnnnnnnnnnnnnnnctgccttattcagtaattgtattaaactttctctgatttctccaagaagataaaatgattggagagctatttaggaaacctggtctaggattatccagtatacaatagtacaaattacttacagccttacagtgcaacataagatttggtgtctatatcatggttttccaccatcttttggtttagtttatattgggttcagaaattgagtcttactcattttaaatagaataagccatttccactatttttcaaatggatttttctgtttacctctgttcttaccaattttgttcattttcatttgtggcaaacatttgtatcaatgagttttaacctaggttcatatctacattgtatttagatcaactatgggtttatataaatgccaaatttagtacaacaaatttaggtcatcaggtgaatacaagtattttttttaacaggaaacattttattatagaaaaaagattaatgataaagtcatattggttgaaaaatattttttaactgtgttcatgattgttgattctccttctacttcagtgttatactgtgtgaatcaagcactgtgtcaaaacagagcatttccctcttaaaaattacaaaccgaagtgatagaagcatgtcagaattgagaagacattttgaagcaagaacaatgtgatgtacctattttattatgtttgtatataaatactattgtaaattgttcagagtgaaaacatttgacaaactctaacactacaatcattttttctaaattacataaataaagctatttttcattat

SEQ ID NO: 92 - DNA, 1285 bp, Homo sapiens
  CDS (650)..(1285)
ggtaagagtgtggatgtaccctattacaagcacagagtcaaaacctgaggctgatcatgtcatctaccacactccccaagtactcaatcatggcatctgtaagtccacctatggtgacctgaatacccaaatcctgggcctgtcattgaatagtagttccttcttaagtcagttaccctggctctacatgcctcaagtgctttgcttgaaaaacaggcaaaacaatttgtacttcaagggtcattcgggtgattaaatagaatggatgcttgtggaaacaccccataaactggtgacatggagagtatctgtacgtgggagttcattttaacttgatgccagattcaggaaggcttcactggcttcttccgagctatgatggtgcctcctctgtagtcctgccatcttctgggtttccgcctctgggcaattttttgaccatctccactggaagacagagaatggcttcagggccgggcacttgtgtcttcctgagtttcatgttccccaatcctaccattggtatgtagtaggtactcagagcttttttactgaatgagtcaactggtgagtaataaagaaagcaggaaggagtggctgagtgaagaaatctggaaagaaggaagggagggaaaacaccaggtaggaaatgagtgaacgatggaagaggagagggaattcaacaaggacctcctctttggcttcaggagctggggaccctgaaccagacctgtggatcatccagccccaggaattggtgttggggaccactggagacactgtctttctgaactgcacagtgcttggagacggtccccctggacccatcaggtggttccagggagctggtctgagccgggaggccatttacaactttggaggcatctcccaccccaaggagacagcggtgcaggcctccaacaatgacttcagcattcttctgcaaaacgtctccagtgaggatgcaggcacctattactgtgtaaagtttcagaggaaacccaacaggcaatacctgtctggacagggcaccagcctgaaagtgaaagcaaaatctacctcttccaaagaggcagaattcaccagtgaacctgcaactgagatgtctccaacaggcctcctggttgtgttcgcacctgtggtcctggggctgaaggcaattaccttggctgcactcctactggccctggctacctctcggaggagccctgggcaagaagatgtcaagaccacaggcccagcaggagccatgaacaccttagcatggagcaagggtcaagagtga

SEQ ID NO: 93 - DNA, 2071 bp, Homo sapiens
  CDS (440)..(1636)
gtcgtttccggtgactgactctctgtttccattctggcaaagtggtttgctcttttcactctgctttgggtgttgaaggaagacgagcttctcacggagcctctcttgagcctcttggcagtttccccctctgtgcccctcacgtttccaccagaaacgtgaaggcagaggccacagattctccctgagccacctcacttggaagcaccatgtccggatgagatcgcacttcctgcagtgggcattagccacgtccaggtagaaccaaacctgttgcttttgtatgttgggtcaacttggcctgacgtttcagaggtagacacgagatagggagttggaagcaggatgtccggatgagatcgcacttcctgcagagggcattatcgtccgagaaacttagaagctgaagccagagagcatctcaaaggttcctgatacaatggatggtgtcactccaaccctttcgacaatcagagggaggaccttggagtccagcactctgcatgtgactccccgcagcctggacagaaataaagaccagatcaccaacatcttttccgggtttgcgggactcctcgccatcctcctggtcgttgcggttttctgcatcttgtggaattggaataaacggaagaagcgacaagttccttacctccgagttaccgtcatgcccttgctgactttgccacaaaccagacaaagagccaaaaatatttatgacatcttgccttggcgacaggaagacctggggagacatgagtcgaggagtatgcgcattttcagtactgagagcctcctctccagaaattctgagagcccggagcatgtgccctcccaagcaggcaatgccttccaggagcatacagcccacatccatgccacagagtacgcggtgggtatctatgacaacgccatggtcccccagatgtgtgggaacctcactccctcggcacactgcatcaatgtcagagcttccagagactgcgcaagcatttcttcagaggattcgcatgattatgtcaatgtccccacagcagaagagattgctgagactctagcttctaccaaaagcccttccagaaatctctttgttcttcccagtacccagaagctggagtttactgaggaaagagatgagggctgtggagatgctggtgactgcaccagtttgtattctccaggagctgaggacagtgattcactcagcaatggagaaggttcttctcagatctcaaatgactatgtcaacatgacagggttggatctcagtgccatccaggaaaggcagctctgggtggcttttcagtgctgcagagactatgaaaatgttccagcagcagatcccagtggaagccagcagcaggctgagaaagatgtgccatcctcaaacataggtcatgtcgaggacaagacagatgatcccgggacccatgtccaatgtgtcaaaaggacattccttgcttcaggggattatgcagactttcagccattcacacagagtgaggacagtcagatgaaacatagagaagagatgtcaaatgaggactccagtgactatgaaaatgtgctaactgccaagttaggaggcagggactctgagcaggggcctggcactcagctccttcctgatgaatgaagacccaggtacccagccataaagccacattgagtagtctatcccataggattgactactgcagagtctagtgcagacccgtgatcaccttagtgcttcagtggattcactggttagattaaaaagaggctgagatgagcagtgaactaagaggccacacaaaagcagaggtttgggaattccagaagggaattcttctcaagcagagtgtggttatctcctgtaccagcctaagaatgtttgctgaaactgcttcctagaactgtgaagaaagcaggaaagtagtgcacagtagtctaagattattaccttcattaataccaacaggctgcaaagcaagagtatagattattgtataatccagtcagaggtcaaaaggaaggaagaagttggagtggagtggggtgggcaatttccattttaaagagtgtaggc

SEQ ID NO: 94 - DNA, 1572 bp, Homo sapiens
  CDS (1)..(1572)
atgggtggctgtgtggaaagaaatgcaatggcacatcgtgattctgagatgaaagaagaatgtctaagggaagacctgaagttttacttcatgagcccttgtgaaaaataccgagccagacgccagattccgtggaaactgggtttgcagattttgaagatagtcatggtcaccacacagtatcatcagctaaaggacattaccctggggacccttggttatggagaaaatgaagacaatagaattggcttaaaagtctgtaagcagcattacaagaaagggaccatgtttccttctaatgagacactgaatattgacaacgacgttgagctcgattgtgttcaattagaccttcaggacctctccaagaagcctccggactggaagaactcatcattcttcagactggaattttatcgatacgcagagatcaggggcatattttctaagtccaagtataggttgccaattttctgtgaaaagaaactaacctttgtcaaatatgtgatttggaatatcattataaagatcaaaatgatggaaatttccaagctagtcagtcaaatgcatttccagaacactcagaaaaatgctcagtatgtcctggtgtttgatgcatttgtcattgtgatttgcttggcatctcttattctgtgtacaagatccattgttcttgctctaaggttacggaaggtgagggggctcatatttggagcacgcactctggagccggcctgcctggacacggatcctggcttagcctctcggtgcctcagttcccttctctgggtgatagacctgctcgtacctgcttcattgggttgttatcggaatggatgtgttggtaatatgaaaagtatttggaatgtactgtgtgttagctatgacaagaacctgctggagttaccgcgtacgtatttcatatttgagagatttctaaatttcttcctggagaagtacaagcggcctgtgtgtgacaccgaccagtgggagttcatcaacggctggtatgtcctggtgattatcagcgacctaatgacaatcattggctccatattaaaaatggaaatcaaagcaaaggtgctgattttaacaatgcaggcctcactgccaaaagttcttcggttttgtgcttgtgctggtatgatttatctgggttacacattctgtggctggattgtcttaggaccataccatgacaaggatatagaatttgaaaatctgaacacagttgctgagtgtctgttttctctggtcaacggtgatgacatgtttgcaacctttgcccaaatccagcagaagagcatcttggtgtggctgttcagtcgtctgtatttatattccttcatcagcctttttatatatatgattctcagtctttttattgcacttattacagattcttatgacaccattaagtatgtggtacaagcaatctttcttgatgagagcaggaaacttccttgcgaagaggctgtccaagtgcttgcttatccgtgcacaccagtagctcttccttgcctagctgtgctttgcctgttgttcgtcaggacatgtagagaaatggtctag

SEQ ID NO: 95 - DNA, 1110 bp, Homo sapiens
  CDS (202)..(600)
tcgggcgaaccaaacttacggctaggtacgaggctgggtgttgggtcttcagtgcgcccaggccggcggggcgcgctccggcggctcctgtcagcggcgggtgcggcggatcccagggcagccttcgggcggcggcgctgcctggtgcgtcgcggcgtggtcctccggcggctgtccggggcggtaggagttggctgcgggatgtgctcagccggggagctgctgcggggcggcgacggcggggaacgcgacgaggacggggacgcgctggcggagcgggaggcggcagggaccgagtgggatcccggggcgagcccgcggcggcgcggacagcggccgaaggagagcgagcaggatgttgaagactcacagaaccacactggtgagccggttggagatgactacaagaaaatgggaacactttttggtgaactgaacaaaaaccttatcaacatgggcttcacaaggatgtattttggagaacgaatagtggaaccagtaatagtcattttcttttgggttatgctgtggttccttggcctgcaagcccttggactagttgctgttctttgccttgttattatttatgtgcaacagtaaaacatggccgaatttgaaaaaaaaaaaaaaaaaaaaaacccaggggcctcaaatgccggggtccggaaaaaacgggttatgaattgcgccattggccaaaaccgtgttctctgacccaagttttcttgtcccaacggggaaaactgccggggctcacttaggggagcggataaattcgataaccccggttacctgtaattcacgaacaaggaccacgcagaaataaatcgacgactaaaaagaggacgaaaacggggacacaaacaagaaaaattttgagaagcacatttaatgcagggaaaataaacgtgtgttagtaaaaaaaaaaagaacaccgataacaaagagcagagagagtataagcacgaccaagaaaagaaagcaaacattattagcaagaaagagacgtctcgagaagagcaagcaagcgagcaacaagacacatagtacagaggcacagagccgtcaaaatagaaaataatcagcaacgaagaacacaggtactacagt

SEQ ID NO: 96 - DNA, 3899 bp, Homo sapiens
  CDS (118)..(3750)
ctcctcagccagaaagcgcagttttgccaggagcttcttggccagtgccaccttcttttgcacattgcgccgtctcaggccgcgtagaagtcgcagtccttgcttagccaaaaggttatgacccggcccaatgccctggatcgatgccgagggaaactcctggtgcacagcctgaaccttttggctaagcaaggactgcgacttctacgcggcctgagacggcgcaatgtgcaaaagaaggtggcactggccaagaagctcctggcaaaactgcgctttctggctgaggagccccagccacccctccccgatgtgctggtctggatgctcagcgggcagcgccgtgtggcctgggcccggatccctgcccaggatgtgctgttctctgtggttgaggaggaacggggccgagactgtgggaagatccagagtctaatgctcacggcacccggggcagcccctggtgaggtctgtgccaagctggagctcttcctgcggctgggcctgggcaagcaagccaaggcctgcacctctgagctgcccccggatttgctgcccgagccctcagccgggctgccctccagcctacaccgggacgactttagctacttccaactccgggctcacttgtaccaggcccggggtgtgttggctgcagatgacagtggcctctcggacccctttgctcgagtcctcatctctacccagtgtcagaccacacgggtcctggagcagacgctgagccctctgtgggatgaactcctggtatttgagcagttgatcgtggatgggaggagggagcacctgcaggaggagcctccattagtgatcatcaatgtatttgaccacaataagtttggcccccccgtgttcctgggcagggcactggccgccccaagggtaaagctgatggaggacccataccaacgcccagagttgcagttcttccccctgaggaagggaccctgggcagccggagagctcattgccgcctttcaactcattgaactagactacagtggccgacttgagccctcagtgcccagtgaggtggagccccaggatctggcacccctggttgagccccactctggacgcctgtcccttccacccaacgtgtgcccagtgctcagggagttccgtgttgaggtgctgttctggggtcttaggggacttggtcgtgtgcatctgctcgaggtggagcagccccaggttgtactggaggtggctgggcaaggtgtggagtctgaggtcctggccagctaccgtgagagccccaatttcactgagcttgtcaggcatctgacagtggtcttcaaagacacagctcctctcttccacccccaggacttgccggagcagccttacttgcagcctccactcagcatcttggtgattgagcgccgggcctttggccacacagtccttgtgggttcccacattgtcccccacatgctgcgattcacatttcggggtcatgaggatcctcctgaggaggaaggagagatggaggagacaggggatatgatgcccaagggacctcaaggacagaagtccctggatcccttcttggctgaagcgggtatatccagacagctcctgaagcctcctctgaagaagctcccactaggaggcctcctaaatcaaggccctgggctggaggaagacatcccagatccagaggagctcgactgggggtccaagtactatgcgtcgctgcaggagctccaggggcagcacaactttgatgaagatgaaatggatgatcctggagattcagatggggtcaacctcatttctatggttggggagatccaagaccagggtgaggctgaagtcaaaggcactgtgtccccaaaaaaagcagttgccaccctgaagatctacaacaggtccctggaggaagaatttaaccactttgaagactggctgaatgtgtttcctctgtaccgagggcaagggggccaggatggaggtggagaagaggaaggatctggacaccttgtgggcaagttcaagggctccttcctcatttaccctgaatcagaggcagtgttgttctctgagccccagatctcccgggggatcccacagaaccggcccatcaagctcctggtcagagtgtatgttgtaaaggctaccaacctggctcctgcagaccccaatggcaaagcagacccttacgtggtggtgagcgctggccgggagcggcaggacaccaaggaacgctacatccccaagcagctcaaccccatctttggagagatcctggagctaagcatctctctcccagctgagacggagctgacggtcgccgtatttgatcatgacctcgtgggttctgacgacctcatcggggagacccacattgatctggaaaaccgattctatagccaccacagagcaaactgtgggctggcctcccagtatgaagtagatggttacaatgcctggcgtgatgcattctggccttcgcagatcctggcggggctgtgccaacgctgtggcctccctgcccctgaataccgagccggtgctgtcaaggtgggcagcaaagtcttcctgacaccaccggagaccctgcccccaggcagcagcagccccacagtggcgagcggggaccctgaagaggcccaggcattgcttgtgctgcggcgctggcaggaaatgccgggttttgggatccagctggtacccgagcatgtagaaaccaggcctctctaccatccccacagcccagggctgctacagggatctcttcacatgtggattgacatctttcctcaagatgtgcctgctccacccccagttgacatcaagcctcggcagccaatcagctatgagctcagagttgtcatctggaacacggaggatgtggttctggatgacgagaatccactcaccggagagatgtcgagtgacatctatgtgaagagctgggtgaaggggttggagcatgacaagcaggagacagacgttcacttcaactccctgactggggaggggaacttcaattggcgctttgtgttccgctttgactacctgcccacggagcgggaggtgagcgtctggcgcaggtctggaccctttgccctggaggaggcggagttccggcagcctgcagtgctggtcctgcaggtctgggactatgaccgcatctctgccaatgacttccttggatccctggagttgcagctaccagacatggtgcgtggggcccggggccccgagctctgctctgtgcagctggcccgcaatggggccgggccgaggtgcaatctgtttcgctgccgccgcctgaggggctggtggccggtagtgaagctgaaggaggcagaggacgtggagcgggaggcgcaggaggctcaggctggcaagaagaagcgaaagcagaggaggaggaagggccggccagaagacctggagttcacagacatgggtggcaatgtgtacatcctcacgggcaaggtggaggcagagtttgagctgctgactgtggaggaggccgagaaacggccagtggggaaggggcggaagcagccagagcctctggagaaacccagccgccccaaaacttccttcaactggtttgtgaacccgctgaagacctttgtcttcttcatctggcgccggtactggcgcaccctggtgctgctgctactggtgctgctcaccgtcttcctcctcctggtcttctacaccatccctggccagatcagccaggtcatcttccgtcccctccacaagtgactctcgctgaccttggacactcacccagggtgccaacccttcaatgcctgctcctggaagtctttcttacccatgtgagctaccccagagtctagtgcttcctctgaataaacctatcacagccaaaaaaaaaaaaaaaaaaaacgaag

SEQ ID NO: 97 - DNA, 963 bp, Homo sapiens
  CDS (250)..(963)
ccctgtcccgacccccggcctggcccactccgaccctacccggccgaagggttccgctggacacgcaggcggcctccggagcagcccaagcccatgagggccgcgcgcccggccgccggtgctgacgagacggagctcctggcccccgaggaggagcagaggatcaatgcggttcaagaatcgattccagcgtgctatcgtaagcactttgggaagccagaggcagactttaagctgggattggggttcatgaaccatcgagctccagccaatggccgctacaagccaacttgctatgaacatgctgctaactgttacacacacgcattcctcattgttccggccatcgtgggcagtgccctcctccatcggctgtctgatgactgctgggaaaagataacagcatggatttatggaatgggactctgtgccctcttcatcgtttctacagtatttcacattgtatcatggaaaaagagccacttaaggttaaatcttcgtgaacttggacccctggcatctcatatgcgttggtttatctggctcatggcagctggaggaaccatttatgtatttctctaccatgaaaaatataaggtggttgaactctttttctatctcacaatgggattctctccagccttggtggtgacatcaatgtacaggactgtgatccttgaaggaagagaaaccaagaaaatgagctttgaattcaccccagtagtttccctggagacactttccaaacagcaacaaaaggagaacaacaccgatggacttcaggaacttgcctgtgggggcttaatttattgcttgggagttgtgttcttcaagagtgatggcatcattccatttgcccacgccatctggcacctgtttgtggccacggcagctgcagtgcattactacgccatttggaaatacctttaccgaagtcctacggactttatgcggcatttatga

SEQ ID NO: 98 - DNA, 1368 bp, Homo sapiens
  CDS (232)..(1368)
gagaggggacaccaagtcctggggcctggccaatagacaaggacacagggatctttgataaacagggtttggctttcttctcagagttgtgatttcttgcttggttcccaggagcccttgggaagctggacctggaacactggagcctgatattctctgttgtggggaatccaaggtgaagtgtggccacgccttgggctgttctggagagctacagcgggagagaagttcatggagttctgtgacacagtgactggccaggaagcccagagcaagaggcgacaagacacagccagatcagggagaaggcctgccagcaatccagacatccacgccgtgagctttctgcaagccctcaggcagggctccggaaggccacctctgggatggtggggtcctacaggtagctctactagaaatatggagagcggaaaccaatcaacagtgactgaatttatcttcactggattccctcagcttcaggatggtagtctcctgtacttctttcctttacttttcatctatacttttattatcattgataacttattaatcttctctgctgtaaggctggacacccatctccacaaccccatgtataattttatcagtatattttcctttctggagatctggtacaccacagccaccattcccaagatgctctccaacctcatcagtgaaaagaaggccatctcaatgactggctgcatcttgcagatgtatttcttccactcacttgaaaactcagaggggatcttgctgaccaccatggccattgacagatacgttgccatctgcaaccctcttcgctatcaaatgatcatgaccccccggctctgtgctcaactctctgcaggttcctgcctcttcggtttccttatcctgcttcccgagattgtgatgatttccacactgcctttctgtgggcccaaccaaatccatcagatcttctgtgacttggtccctgtgctaagcctggcctgtacagacacgtccatgattctgattgaggatgtgatccatgctgtggccattgtattctctgtcctgattattgccctttcttatatcagaatcatcactgtaatcctgaggattccctctgttgaaggccgccagaaggccttttctacctgtgccgcccatcttagtgtctttctgatgttctatggcagtgtatccctcatgtacctgcgtttctctgccactttcccaccgattttggacacagctgttgcactgatgtttgcagttcttgctccctttttcaaccctatcatctatagctttagaaataaggacatgaagattgcaattaaaaagcttttctgccctcagaagatggttaatttatctgtagattaa

SEQ ID NO: 99 - DNA, 1521 bp, Homo sapiens
  CDS (334)..(1521)
catgatttttaaagagcgggtggagcataacgatttgaggcactgcgacaatgcagaatggggagggtttttggaaaatgtgactcactcaccgttccgaccaaagggtaaatgaacccagcacctatgctggcccggacatcactgataggtaagatgaagtcacttggcacaccttttttgtcaggttggtgagacagagaaagatcggtctttgccatgcagatgggcaaatttccaaaaccctgtaagaaaggaaagaaaatgtgttcactgatatagatgtgagtctcctgtgtttttcaatttgcactttatacagtctcggcagcaatggtatgccagctcagatcgaggcacatgcaggagctgcttgttactacttgttcactgaagaagcaagaagcatctacaaatctgaaggacaaaacatggttcaagcatctgggcacaggcggggaggcagctctcctgctgaaatcctccacttggcccatggccctctggtccacccgtggctccaaaatggtctcctggtccgtgatagcaaagatccaggaaatatggtgcgaggaagatgagaggaagatggtgcgagagttcttggccgagttcatgagcacatatgtcatgatggtattcggccttggttctgtggcccatatggttctaaataaaacatatgggagctaccttggtgtcaacttgggttttggcttcggggtcaccatgggagtccacgtggcaggccgcatctctggagcccacatgaatgcagctgtgaccttcactaactgtgcgctgggccgcgtgccctggaggaagtttccagtccatgtgctggggcagttcctgggctccttcctggcagctgccaccatctacagtctcttctacagcaagtgtgctgcctgggagtggctgaccaggatgctccagctgtgtctcttcaccatcacggaccaggagaacaacccagcactgccaggaacacacgcgctggtgataagcatcctcgtggtcatcatcagggtgtcccatggcataaacacaggatatgccatcaatccatcccgggacccgccccccagcatcttcaccttcattgctggctggggcaaacaggtcttcagcctggggatgactcctctgctcaaccagtcttcgcccaaggtggatgagggtgctgtcctgggcatcagccccctcagcaggcctctgcctcttgcctgcagcgatggggagaactggtggtgggtgccagtggtggcaccacttctgggtgcctctctaggtggcatcatctacctggtcttcattggctccaccatcccacgggagcccctgaaattggaggactctgtggcgtatgaagaccacgggataaccgtattgcccaagatgggatctcatgaacccatgatctctcccctcaccctcatctccgtgagccttgccaacagatcttcagtccactctgccccacccttacatgaatccatggccctagagcacttctaa

SEQ ID NO: 100 - DNA, 2459 bp, Homo sapiens
  CDS (829)..(2451)
gaccgctgactcggcgcagtggctctcggtgaaggaagagaccatcttcctgcacgacgggctgatccgggtcaccgacctggccgagctgcccagcgagatcctcggggccccagaggccgcggacaccgacctggagattttaacctttgagaccaagaacccgtcggaattagcagaacgtttgcgctctgtttgtgggaatcagagcaatgcctatgcccggctgctggaataccgcctgaatgccttgcgaggactgtggaatgcccagcgccagctggccttagaagaacagcatgaaagggaaagttcaggtgatgaggaaactttggccctgctcaaacgccagggcttgttgcagcaacctgagcaagcgcccttcacatcgaggatggggctcctgctggtcttcccccttattcagtcccagagtagaacagacccctctctctgtaacataactgctgaggtgctattgaactgccttcgtgactgccagcctttgagcttgaccaaggagcctgctgactgtctcaatggaattgaaactttgctgtgctcttggctagaggagacttctgacacaggccgacacatcccacataagcaaaaagaaaatgctgctgctgccctggtggctttggcttgtgccagggatcattgaaaactttcgtccacacagtccatctattacagaaacagacggatctagggtccctgcctgtagctgatgtgctatataggctgttgcttttggaaggggggcctggatctccctcctgtttgcttgggggcaaacacatagtatcatggggttatgaagacatgttgcctgcgccggatagcaacactggctccagttctgaaaataaagatgctgacttgggacgctgtctcacggcagatggtctttacctgtatactactaactcagttggaagaggagtaagcaaattgggatctggattacatggtactctcagaggttttgtgtactgccggaacgaggagttggaaccaggatgggtggcttttggcagcggcagtcttctccaccggcctgtctctttcgataataaacctcactcccttttccaggtcattgaccagaacacccttcaggtgtgccaggtggtgccaatgccagccaatcacctccccattggcagcaccatgagcactgtgcacctgtcttcagatggcacttacttctattggatctggtctcctgccagcctgaatgagaaaacaccgaagggacattctgtcttcatggacatttttgaacttgtggttgaaaatggtgtatttgtagccaacccacttcaggaacgtacaattctaatgagaaaagagggcgaatctgccaaaagcattaatgagatgcttctaagtagactttctcggtatagagcctccccgtcagcaacgcttgctgccctgactggttccaccatctccaacacactgaaagaggatcaagcagcaaatactagctgtgggctgcctctaaaaatgctgcggaagacacccatatatacctgtggcacctacttggtgatgctggtgcctcctccagggggatcaggcagctctgccacccgatctctttttggtggaacaagtggtttgtcatctttaaaaatcctagcctccagcttggtgtataatatttcggatggtcagtttacaagtcgtgcagatctcatagatgctgctggaagctcactggggcgtggtgctctcgtaccaggattgggagcgtgttatgacacagtgaacaacatgctatggacatgctcaaatgactatatcgatcagtggtgtaaccctgggaatcaagccttccattatgtctgccagagacttggagtcagtcacattatcactgagcccaaagaagaggctataaccacgaatgaggttataaaccaattattgcaccacgttggtgcgatgtgcatacaccaactcaatcttcttgccaccaaccccaatcttccaatcacaagtgtcttgggcaagcagcatccaattgaagcacatcatcttagcagtatttgtgacattatggagaaggccatggttaatggagatacctgtattatacgctgcattctcgttgtctttcaggtggtatttaaatttttcttcagcccacaaactgaaaggaatcgagacatcattcgacggtcgggattgcttctttggcagttgttgatggctccaaaagatcaaatttgccctgaaattcagaaggaagtctgccttgccatcaggctctggtttcaaatatcttgtaccccaggtgaaactgacatcactaacttacttaaactggtcttaacagaagggagagagaaacagtggactctccccagctacgggaatgtgatcctaaccatcctgtgtgaacagtcccaaaacaaccgatttggcagcggatgagggtgatc

SEQ ID NO: 101 - DNA, 1694 bp, Homo sapiens
  CDS (6)..(1694)
taagaatgacccaaaataaattaaagctttgttccaaagccaatgtgtatactgaagtgcctgatggaggatggggctgggcggtagctgtttcatttttcttcgttgaagtcttcacctacggcatcatcaagacatttggtgtcttctttaatgacttaatggacagttttaatgaatccaatagcaggatctcatggataatctcaatctgtgtgtttgtcttaacattttcagctcccctcgccacagtcctgagcaatcgtttcggacaccgtctggtagtgatgttgggggggctacttgtcagcaccgggatggtggccgcctccttctcacaagaggtttctcatatgtacgtcgccatcggcatcatctctggtctgggatactgctttagttttctcccaactgtaaccatcctatcacaatattttggcaaaagacgttccatagtcactgcagttgcttccacaggagaatgtttcgctgtgtttgctttcgcaccagcaatcatggctctgaaggagcgcattggctggagatacagcctcctcttcgtgggcctactacagttaaacattgtcatcttcggagcactgctcagacccatcattatcagaggaccagcgtcaccgaaaatagtcatccaggaaaatcggaaagaagcgcagtatatgcttgaaaatgagaaaacacgaacctcaatagactccattgactcaggagtagaactaactacctcacctaaaaatgtgcctactcacactaacctggaactggagccgaaggccgacatgcagcaggtcctggtgaagaccagccccaggccaagcgaaaagaaagccccgctattagacttctccattttgaaagagaaaagttttatttgttatgcattatttggtctctttgcaacactgggattctttgcaccttccttgtacatcattcctctgggcattagtctgggcattgaccaggaccgcgctgcttttttattatctacgatggccattgcagaagttttcggaaggatcggagctggttttgtcctcaacagggagcccattcgtaagatttacattgagctcatctgcgtcatcttattgactgtgtctctgtttgcctttacttttgctactgaattctggggtctaatgtcatgcagcatattttttgggtttatggttggaacaataggagggactcacattccactgcttgctgaggatgatgtcgtgggcattgagaagatgtcttctgcagctggggtctacatcttcattcagagcatagcaggactggctggaccgccccttgcaggtttgttggtggaccaaagtaagatctacagcagggccttctactcctgcgcagctggcatggccctggctgctgtgtgcctcgccctggtgagaccgtgtaagatgggactgtgccagcatcatcactcaggtgaaacaaaggtagtgagccatcgtgggaagactttacaggacatacctgaagactttctggaaatggatcttgcaaaaaatgagcacagagttcacgtgcaaatggagccggtgcagaacaagaaaagtggcaagagaacttacaacttccctttccatgtaacaactcacccaaatcaaaactacttcaatgactatccatttcctacatggaaaattagacgggaaacctga

SEQ ID NO: 102 - DNA, 1247 bp, Homo sapiens
  CDS (44)..(511)
gccgcctcgggccgcagagcttgccccctccccacccgcaaacatgttcgagtccaagaacggccccgagtatgcttcgtttttccccgtcatgggcgcctcggccgccatggtcttcagcgccctgggccctgcctatggctcaaccaagagcggtaccggcatttcggccatgtctgtcattcggccggagcagatcatgaagtccatcatcccagtggtcatggctggcatcatcgccatctacggcctggtggtggcagtcctcatcgccaactccctgaatgacgacatcagcctctacaagagcttcctccagctgggcgccggcctgagcgtgggcctgagcggcctggcagccggctttgccatcggcatcgtgggggacgctggcgtgcggggcaccgcccagcagccccgactattcgtgggcatgatcctgattctcatcttcgccgaggtgctcggcctctacggtctcatcgtcgccctcatcctctccacaaagtagaccctctccgagcccaccagccacagaatattatgtaaagaccacccctcctcattccagaacgaacagcctgacacatacgcacggggccgccgcccccagtagttggtcttgtacatgcgcagtgtcctagtgcccatcgtctgtttccccggccttgcccccgcccgccccgtgccgtggacatctgggcccactcatcgcccctccaggcccccggcgccccaccccctagagtgctctgtgtatgcggatgatttagaattgtcatttctctttactggatgtttatttataaagatctggcctgttcctgcgtctgcggagcggcccttgtctcccagctatctataaccttagctagagtgtcgccttgtgggttcctgttgctgagacttcctggatggagccgccctcaccgccgggcccgtggccctgcgcggagctgtgtccaataaagttcttggatgtgaaaaaaaaaaaaaaaaagggggttgtgcccttaaaagaaacaacggtcccctggggctgtctccaaaaaaagttttttattacattgccaaagaaacggatgactgggccggcctgatgattacagggaaactgaaaattccgagcagacccccccttattgcggtggggccatagcctctgccctgatcatcaaagccctcaaggaaccaccaagagacagaaagaaacagaaaaacattaaacacagtgggaatatcacttg

SEQ ID NO: 103 - DNA, 2032 bp, Homo sapiens
  CDS (419)..(1402)
ggcaggacctgctcagccaatcagcttttcctttctcagaactgcccgtggaaacctggctgggcttctggcttcagagctgggaattgtgggaggagggcccagatcccactggagataccgaaggagatactctttagtattgggatcccagaaaccagtcctatatctggccagagggacactgggttgtggcatctctctagctgctacccagaaggaacagggccccctggggcctataggccttgcccctgaccctgggaacacccagctcaggcctgccccagtggccacaagtcagggaggccgcaaatttttaactagaaacattgatcattaatagggggttagaaagagttcaaactaagtctcactctgggacatagaccaattgtgcttcaggcctcctgcagagatgctgggtccccaagtctggtcttctgtgaggcaggggctaagcaggagcttgtccaggaatgtgggggtctgggcctcaggggaggggaagaaggtggacattgcgggtatctacccccctgtgaccacccccttcactgccactgcagaggtggactatgggaaactggaggagaatctgcacaaactgggcaccttccccttccgaggcttcgtggtccagggctccaatggcgagtttcctttcctgaccagcagtgagcgcctcgaggtggtgagccgtgtgcgccaggccatgcccatgaacaggctcctgctagctggctccggatgcgagtccactcaagccacagtggagatgaccgtcagcatggcccaggtcggggctgacgcggccatggtggtgaccccttgctactatcgtggccgcatgagcagtgcggccctcattcaccactacaccaaggttgctgatctctctccaatccctgtggtgctgtacagtgtcccagccaacacagggctggacctgcctgtggatgcagtggtcacgctttcccagcacccgaatattgtgggcatgaaggacagcggtggtgatgtgaccaggattgggctgattgttcacaagaccaggaagcaggattttcaggtgttggctggatcggctggctttctgatggccagctatgccttgggagctgtggggggcgtctgcgccctggccaatgtcctgggggctcaggtgtgccagctggagcgactgtgctgcacggggcaatgggaagatgcccagaaactgcagcaccgcctcattgagccaaacgctgcggtgacccggcgctttgggatcccagggctgaagaaaatcatggactggtttggctactatggaggcccctgccgcgcccccttgcaggagctgagccccgctgaggaggaggcactgcgcatggatttcaccagcaacggctggctctgagggcaggcagggtccatggctggcctgagcccatctcagcctcctgccttgcacttgcagcctgaagcggagagcacagggggatgagggtggcaggcagcggggagccgatagaggctcctttgcctgctgtggtcctccaggcagcctttcacaggcacgcccatgcatatctcctattctaacggcccctgacctctcccttttggatcctaaactgtgtctctggtctgaagactgggaaggagcaatttctcaatttatctttctactgtggatgctttcctacgccctgaggcacatgaagtcagaaaggaagggcagaggggcaagtaggcacagtaagggaattttcttttcttttttttttttttgaaaaaaaattttatttttgccccccaggggggggggaaagggacataacccccccccggggttaaaagaattttcctggctaaaccccccaaatacggggaaataaagggccctgcccccaccccaaaataatttttgttttttaaaaaaaaagggggtttccccgggggggcccggggggttttaaacccccgaccccaggggaaccaattggcttggccctccaaaagggggggaataaccgggggaaccccc

SEQ ID NO: 104 - DNA, 3378 bp, Homo sapiens
  CDS (166)..(3378)
atgtcactgagcagaggcgtgagactgccggccagccctgctgtgtacactgatagaattagtgagcgagcgtcccactctgatggaatccagatggaactcgtcactgtcactgcggtggagacgtccctcgggctcatacctagtgcctgcggcaggacagccatggccgccaactccaccagcgacctccacactcccgggacgcagctgagcgtggctgacatcatcgtcatcactgtgtattttgctctgaacgtggccgtgggcatatggtcctcttgtcgggccagtaggaacacggtgaatggctacttcctggcaggccgggacatgacgtggtggccgattggagcctccctcttcgccagcagcgagggctctggcctcttcattggactggcgggctcaggcgcggcaggaggtctggccgtggcaggcttcgagtggaatgccacgtacgtgctgctggcactggcatgggtgttcgtgcccatctacatctcctcagagatcgtcaccttacctgagtacattcagaagcgctacgggggccagcggatccgcatgtacctgtctgtcctgtccctgctactgtctgtcttcaccaagatatcgctggacctgtacgcgggggctctgtttgtgcacatctgcctgggctggaacttctacctctccaccatcctcacgctcggcatcacagccctgtacaccatcgcagggggcctggctgctgtaatctacacggacgccctgcagacgctcatcatggtggtgggggctgtcatcctgacaatcaaagggactgccctggctggtagaggctacccaccctgctgccccgctgttaccagctctggccctggcaaggagctgactcaggaactcagggccagccacacccgcattggctcagcgcttgatgcttttgaccagatcggtggttacgggcagctggaggcagcctacgcccaggccattccctccaggaccattgccaacaccacctgccacctgccacgtacagacgccatgcacatgtttcgagacccccacacaggggacctgccgtggaccgggatgacctttggcctgaccatcatggccacctggtactggtgcaccgaccaggtgcttcgactgagacagtttggagtatgggattccgaagggactcggatgctcctcggtggccctgccatcggtcatggggcgggcattttgggccagtcttgggctgccgggatccggaagcaggcggggtacctgacctcccttggcctgccagtggtgggggccagccatggctgggccagcgtttctggtagagctctggacgctgtcagcagcagagcggtcatcgtgcagcgatcactgtcagcccgggacctgaaccatgccaaggcgggctccatcctggccagctacctcaagatgctccccatgggcctgatcatcatgccgggcatgatcagccgcgcattgttcccagggatgcccttgaggctcacactgtgtgacatgaggtacagctcctggaactgccggtcaaacatctccaccacctggccagacagcacagagatcacattccggtccgtccgcgcggccgaccacgtgaagctgcaacagagggagggggcgctggtcaggcacatgaccctgcttcctccgcccagcccccgtgcacccatagccgctgggcctcagactgtggccacagggccctgggatcaagaagtgaatgggggcagagagcagacccctgtggctggggtggccccaggcaagcaaccacagaggcaggcaggtgtgggccgtgggctgcaggtttgcacacagccagctcagcaggaagctggccacggcccaggacaattagcgctcgtgactttgtacccaacatggagcacgctcggggttgagaagtcggacaaagatcctggaggtgggaattcaagcagtggctatgtgactgcttggcaggaggctctaggattactggactctgagtgcctggcacaggactccgtccagagcaggcaggtactcgaagtgtttgttgacagactgaatgacccctgccctccagccacccaggcaagtgaggagcctgctcaccttgaggtgccccaggtgcatgcaggcccgctcacacatgtgcaggaagtacttgacgttactctcatccacgatgatgtacacggccactttcctcttgaagccggcgtccagcaggtccttgaagatgtccacggtctgcctgttgtgctgacgacaggtaaggatgcgcttgagctccagctccgagaggaagtctcggatgttctcccgcttgagcacctcgtagaaggcgtcccggccgcgggccaccagggcctccagcgccagccgctgctcctcgctgtagaagaactcaggcttggactcgctggagcgccagttcacatggttgtcgtccagacactgcacctgagagaaggccatggcgccgcctgcccgggcactgctgccgggggtgctcatgtctatgaggagagacaccaagtgtccgtctctcgaacagatgatgtgggctgcgtggtgccgtccgagtgcctgcgggcctgcggggccgaggtcggctgctccaacatcgcctaccccaagctggtcatggaactgatgcccatcggtctgcgggggctgatgatcgcagtgatgctggcggcgctcatgtcgtcgctgacctccatcttcaacagcagcagcaccctcttcactatggacatctggaggcggctgcgtccccgctccggcgagcgggagctcctgctggtgggacggctggtcatagtggcactcatcggcgtgagtgtggcctggatccccgtcctgcaggactccaacagcgggcaactcttcatctacatgcagtcagtgaccagctccctggccccaccagtgactgcagtctttgtcctgggcgtcttctggcgacgtgccaacgagcagggggccttctggggcctgatagcagggctggtggtgggggccacgaggctggtcctggaattcctgaacccagccccaccgtgcggagagccagacacgcggccagccgtcctggggagcatccactacctgcacttcgctgtcgccctctttgcactcagtggtgctgttgtggtggctggaagcctgctgaccccacccccacagagtgtccagattgagaaccttacctggtggaccctggctcaggatgtgcccttgggaactaaagcaggtgatggccaaacaccccagaaacacgccttctgggcccgtgtctgtggcttcaatgccatcctcctcatgtgtgtcaacatattcttttatgcctacttcgcctga

SEQ ID NO: 105 - DNA, 1979 bp, Homo sapiens
  CDS (360)..(1979)
gggcccggcagaaggccgagtaggagggaccacgcgccgggggccgcgatctctggcagggggcggtgtgccagcggagcaccatgcacataggcgcccagcgccccgactacccctcccgaggaaaagaggccggggccgcgctggggcggcggagagcatgagggaggccggggggcggctcggcttggagcgctgctagggagcggtgcgcgccgcacacccgcctgggcgcggcggagggcggggagccgggcaggtcgcgcctgcgggcggcagccgaccgccgggagctgttctgatttccgacgcgcacgctaggggcccggagcagcccccggccccggcgcgccgccgacatgggcaacgcagggagcatggattcgcagcagaccgatttcagggcgcacaacgtgcctttgaagctgccgatgccagagccaggtgaactggaggagcgatttgccatcgtgctgaacgctatgaacctacctcctgacaaagccaggttactgcggcagtatgataatgagaaaaaatgggaactgatttgtgatcaggaacgattccaggtgaagaatcctccccatacatacattcaaaagctcaaaggctatctggatccagctgtaaccaggaagaaattcagacggcgtgttcaagaatctacacaagtgctaagagaactggaaatttctttgagaactaaccacattggatgggtcagagaatttctgaatgaagaaaacaaaggtcttgatgttctagtggaatatctctcatttgcacagtacgcggtaacttttgactttgaaagtgtggagagtactgtggagagctcggtggacaaatcaaagccctggagtaggtccatcgaggacctgcacagagggagcaacctgccctcacctgtgggcaacagtgtctcccgctctggaagacattctgcactgcgatataatacattgccaagcagaagaactctgaaaaattcaagattagtgagtaagaaagatgatgtgcatgtctgtatcatgtgtttacgtgccatcatgaattatcagtatggtttcaacatggtcatgtctcatccacacgctgtcaatgagattgcactaagcctgaacaacaagaatcccagaacaaaagcccttgtcttagaactgttggcagccgtttgtcttgtcagaggcgggcatgaaatcattttatcagcatttgataactttaaagaggtttgtggagaaaaacagcgctttgagaagttgatggaacatttcaggaatgaagacaataacatagattttatggtggcttctatgcagtttattaatattgtagtccattcagtagaagatatgaatttcagagttcacctgcagtatgaatttaccaaattaggcctggacgaatacttggacaagctgaaacacactgagagtgacaagcttcaagtccagatccaggcttacctggacaatgtttttgatgtaggagctctactggaagatgctgaaactaagaatgctgccttggagagggtggaagaactggaagaaaacatttctcatttatctgaaaaactgcaagacacagagaatgaagccatgtccaagattgtggaactggaaaagcaactcatgcagaggaacaaggagctggatgtcgttcgggaaatctacaaagatgcaaatactcaagttcacacattaagaaaaatggtcaaagaaaaagaagaagcaattcaaagacagtctaccctggaaaaaaagattcatgagctagagaaacaagggaccattaaaattcagaagaaaggggatggggatatcgccatactgccagttgtggcttctggcacattgtccatggggtcagaagtggtagcagtggttttcaactcaggattagcaggtaagagcaccgaattcaaacccaggtactcatatcagaaatgctgtcttatctcggagagttga

SEQ ID NO: 106 - DNA, 1761 bp, Homo sapiens
  CDS (728)..(1627)
tgtgagaagtttctgggatattggttcactcagcactgatgtttaaaaatgccttctatgtgccagacgctgttgtaggtaccgggaatatggcggttaaattaagagggtgaaggtttctgctctgatacagtttatattctaaatgtgagaggacagaccagttagatagatgtaaattaaataattaaatagatgatttttacatactgtagagctatagagaaaatatagctggatgggtgatagtgacttggggatgggggtggctactctggatagggtagtttaaggtgacatctctgtgcagatgtagaatgggctagtgctttctaagaactgaaagatcagtgaagaaggggagcatagtgactgaggagtagtgtggcattagatggggtctgagagttacacaggaacatgtggagcctgtaggccatggtaaagcctttttctactcttctggtgatttaaagccattgtaaagttttgagcttgggagtaggtagcaaaataagatttatatttttatggggttactctggctgttgagaggagaaaaagacatgaatctgggaggccacttgggaagcaaggccatcagtgaagagaaagagtgggagaaaaaggtttgaggagagaaggtataggactttcactaaccttggaccatatatttgccaggaagaatgtaagttctccaacatcttcaaataaagaagtggttatgaggaatgatcagaataatggagatatgaaaccattccagaatttcacaacaataccaatcacacaggctctcaactacaatctgagcaaagaagggcatttagaaaaagaaccttggaatgcattcagccatcatggcccagttaatgtctccatcaatggaattccttgcattctcttctgggccaaaagaataatgattaaatttaagaatcaaacctggctggaccttacagacgagccatttggtcagaaggtaactgtggaccctgacaactcaaattgcagtgaagaaagtgctaggttgtctttgaagcttggtgatgctggaaaccccagaagtcttgctataagattcatccttaccaattacaacaagttgtccatccagagttggtttagtttgcgccgagtcgagatcatttccaacaattcaatccaagcagtctttaacccaactggcgtatatgctccctctggttactcctaccgctgccaacgcgtgggcagcctgcagcaggaccaggccctcttgctgcccagcgacacggatgatgggtcgagcctgtgggaggtcacttttattgatttccagatccaaggttttgccatcaaggggggacgatttaccaaagcccaagactgcgcctcctccttctcgccagcttttctgatcggcctggcaatgtccctgatcctgctgctggtgttggcctatgccctgcacatgctcatctacctgcggtatctggaccaacaatatgatctcatcgcctctcctgcccacttctcgcagctgaaagctcgagacacagccgaagagaaggagctgctgaggagccagggggctgaatgctataaactgagaagccaacagatcagcaaaatctatgtttagcagcacaggctggcccccaccatgtccacagtgggctccgaaagttgtctctgttctgtgctatttgacttgtgaattacagattttcaccaaatggcttgattacaaaaaaaaaaaaaaaaaacaacatcagc

SEQ ID NO: 107 - DNA, 2835 bp, Homo sapiens
  CDS (1)..(2835)
atgacactgaaccagttccaggtccagatgttaaggaaactagaagcttctgcttttgtacccttagaactagaagaccaccatgctaacaaagctcgccgagaggacttctgtcctcggaagctgcggcagatgcacctgatgattgaccagctcatggcccactcccacctgcgttacaagggaactctgtccatgttacaatgcaatgtcttcccggggcttccacctgacttcctggactctgaggtcaacttattcctggtacccttcatggacagtgaagcagagagtgaaaacccaccaagagcaggtacagttaccctcaacagtttccagtccttggtgagcaagctccggagccaagtgatgtccatggcccggccacagctgtcacacacgatcctcaccgagaagaactgctcagggctgagattgttgattggattcacctgtgatcttgtggtcagtgttgccaaggaaggtctgaatcagcacactcttggtgtccctggctgccaaatccaggggcgtgtgaagcatccggtagatggtggtgaaggaggtgctgcagaggataatcactactgccttcagatggcaggcatcacaggctttggcgaaggtaaccctgtctcctggagaaacggtttctgcgtgacctccaaggactgcaaatttggcaactccatctatgccctgacctatggtgttggctttggcttctgcgtcaacaccacctgttgccaaggcaactaccaggagcccacccctctcgcagctcatctggcctcacacaccctgagtgagatattgtgtcctacatgtcctgggagctacttggagccctgcaattcctccttctacatgcagtgtcccagtggggaatctgagtgtgtccagctggacctaacgtctgaagaaggcggccggaacgtgaacgtacgcggctgcggctcccgagacctgtgcagcgccctggactggacccacgggctctctgtgctcccaagacactgggctgtagagccactgcagcccccaccgccgcgccgtcatagatcctggcaaccgcgacgctgtgataaggaatcccgcctggaccaccccgccgcccgggaggccccctccacctgcttgttcggcacgtcgatagatggtgccctggctcccctctgctggggcaatgcggagacctggaagcctctggtaaccatgtctgagtctggacacagtcagcctggactctatgggatagagcggcggcgacggtggaaggagcctggctctggtggcccccagaatctctctgggcctggtggtcgggagagggactacattgcaccatgggaaagagagagaagggatgccagcgaagagacaagcacttccgtcatgcagaaaacccccatcatcctctcaaaacctccagcagagcggtcaaaacagccaccacctccaacagcccctgctgccccgcctgctccagcccctctggagaagcccatcgttctcatgaagccacgggaggaggggaaggggcctgtggccgtgacaggtgcctctacccctgagggcaccgccccaccaccccctgcagcccctgcgccacccaagggggagaaggaggggcagagacccacacagcctgtgtaccagatccagaaccggggcatgggcactgccgcaccagcagccatggaccctgtcgtgggtcaggccaaactactgcccccagagcgcatgaagcacagcatcaagttggtggatgaccagatgaattggtgtgacagtgccatcgagtacctgttggatcagactgatgtgttggtggttggtgtcctgggcctccaggggacaggcaagtccatggtcatgtcattgttgtcagccaacactccagaggaggaccagaggacttatgttttccgggcccagagcgctgaaatgaaggaacgagggggcaaccagaccagtggcatcgacttctttattacccaagaacggattgttttcctggacacacagcccatcctgagcccttctatcctagaccatctcatcaataatgaccgcaaactgcctccagagtacaaccttccccacacttacgttgaaatgcagtcactccagattgctgccttccttttcacggtctgccatgtggtgattgttgtccaggactggttcacagacctcagtctctacaggctgtgggacctggggtgcaagtgcaagagcaacagccactcaccccaaaccccaaggttcctgcagacagcagagatggtgaagccctccaccccatcccccagccacgagtccagcagctcatcgggctccgatgaaggcaccgagtactacccccacctagtcttcttgcagaacaaagctcgccgagaggacttctgtcctcggaagctgcggcagatgcacctgatgattgaccagctcatggcccactcccacctgcgttacaagggaactctgtccatgttacaatgcaatgtcttcccggggcttccacctgacttcctggactctgaggtcaacttattcctggtacccttcatggacagtgaagcagagagtgaaaacccaccaagagcaggacctggttccagcccactcttctccctgctgcctgggtatcgtggccaccccagtttccagtccttggtgagcaagctccggagccaagtgatgtccatggcccggccacagctgtcacacacgatcctcaccgagaagaactggttccactacgctgcccggatctgggatggggtgagaaagtcctctgctctggcagagtacagccgcctgctggcctga

SEQ ID NO: 108 - DNA, 1146 bp, Homo sapiens
  CDS (46)..(1146)
acagctttctacacctttactccctgcaaagaaacaatagtgcttatgccagctaagctccagggtaatggtatcatgacagcttcaacttttagaccacaggcgaatgctttgaaccataaatccatggctaaccttgacaaatacactgaaacattcaagatgggtagcaacagtaccagcactgctgagatttactgtaatgtcactaatgtgaaatttcaatactccctctatgcaaccacctatatcctcatattcattcctggtcttctggctaacagtgcagccttgtgggttctgtgccgcttcatcagcaagaaaaataaagccatcattttcatgatcaacctctctgtggctgaccttgctcatgtattatctttacccctccggatttactattacatcagccaccactggcctttccagagagccctttgcctgctctgcttctacctgaagtatctcaacatgtatgccagcatttgtttcctgacgtgcatcagtcttcaaaggtgcttttttctcctcaagcccttcagggccagagactggaagcgtaggtacgatgtgggcatcagtgctgccatctggatcgttgtggggactgcctgtttgccatttcccatcctgagaagcacagacttaaacaacaacaagtcctgctttgctgatcttggatacaagcaaatgaatgcagttgcgttggtcgggatgattacagttgctgagcttgcaggatttgtgatcccagtgatcatcatcgcatggtgtacctggaaaactactatatccttgagacagccaccaatggctttccaagggatcagtgagaggcagaaagcactgcggatggtgttcatgtgtgctgcagtcttcttcatctgcttcactccctatcatattaactttattttttacaccatggtaaaggaaaccatcattagcagttgtcccgttgtccgaatcgcactgtatttccaccctttttgcctgtgccttgcaagtctctgctgccttttggatccaattctttattactttatggcttcagagtttcgtgaccaactatcccgccatggcagttctgtgacccgctcccgcctcatgagcaaggagagtggttcatcaatgattggctaa

SEQ ID NO: 109 - DNA, 747 bp, Homo sapiens
  CDS (1)..(747)
atggcacctaaggcggcaaagggggccaagccagagccagcaccagctccacctccacccggggccaaacccgaggaagacaagaaggacggtaaggagccatcggacaaacctcaaaaggcggtgcaggaccataaggagccatcggacaaacctcaaaaggcggtgcagcccaagcacgaagtgggcacgaggagggggtgtcgccgctaccggtgggaattaaaagacagcaataaagagttctggctcttggggcacgctgagatcaagattcggagtttgggctgcctaatagctgcaatgatactgttgtcctcactcaccgtgcaccccatcttgaggcttatcatcaccatggagatatccttcttcagcttcttcatcttactgtacagctttgccattcatagatacatacccttcatcctgtggcccatttctgacctcttcaacgacctgattgcttgtgcgttccttgtgggagccgtggtctttgctgtgagaagtcggcgatccatgaatctccactacttacttgctgtgatccttattggtgcggctggagtttttgcttttatcgatgtgtgtcttcaaagaaaccacttcagaggcaagaaggccaaaaagcatatgctggttcctcctccaggaaaggaaaaaggaccccagcagggcaagggaccagaacccgccaagccaccagaacctggcaagccaccagggccagcaaagggaaagaaatga

SEQ ID NO: 110 - DNA, 2964 bp, Homo sapiens
  CDS (57)..(2543)
cttccccagtggatgggaagctgtatcagcacatctgcaccattttcccccttttcatgctgttaaattccttctccttcagcatcatggatgtaagccatatcattctccctactattccaatggccatcatctaccagcctcctatgttctctcagttgctgaaggctttgcagactgatgtccccacaccagctacccaattactatggccaaactttaaccctattcatcactcacaattgctccacctgttgaagaaattccttaaattccagtatctctcttacctaattggagccaagctgacaagggagtctgagaaatctaaagagtttaaaagtattgatattggccagattttccaaatgaaaaccgccatcaagaagaaaagaggagctgccaaggccatgtctgttccatcatcactgagccagtcggccattaatgccaacagccacggaggccccgcactgagcctacccctgcctctgcacgctgcccacaaccagctgctcaacgccaagctgcaggccacagctgtgggacccaaggacctgcgcagcgccatgggggagggtggtgggcctgagccaggccctgccaatgccaagtggctaaaagagggccagaaccagctccggcgggccgccacggcccaccgtgaccagaatcgcaatgtgaccttgaccttggcggaggaggccagccaggagcctgagatggcacccttgggccccaaaggcctgatacacctgtactctgagctggagctctcagctcacaatgcagccaaccgaggcctacgaggacctggcctgatcatcagcactcaagagcaggggccagatgagggagaggagaaggcggccggggaggccgaggaggaggaggaggatgatgatgatgaagaggaggaggaggacttatcttctcccccagggctgcctgagcccctggagagtgtggaggcccctcccaggccccaagcccttacagatggcccccgggaacacagcaagagtgccagcctcctgtttggcatgcggaacagtgcagccagtgatgaggactcaagctgggctaccttatcccagggcagcccctcctatggctccccagaggacacagattccttctggaaccccaacgccttcgagacggattccgacctgccggctggatggatgagggtccaggacacctcagggacctattactggcacatcccaacagggaccacccagtgggaaccccccggccgggcctccccctcacaggggagcagcccccaagaggagtcccagctcacctggacaggttttgctcatggagaaggctttgaggatggagaattttggaaggatgaacccagtgatgaggccccaatggagctgggactgaaggaacctgaggaggggacgttgaccttcccagctcagagcctcagcccagagccgttgccccaagaggaggagaagcttcccccacggaataccaacccagggatcaagtgtttcgccgtgcgctccctaggctgggtagagatgaccgaggaggagctggcccctggacgcagcagtgtggcagtcaacaattgcatccgtcagctctcttaccacaaaaacaacctgcatgaccccatgtctgggggctggggggaaggaaaggatctgctactgcagctggaggatgagacactaaagctagtggagccacagagccaggcactgctgcacgcccaacccatcatcagcatccgcgtgtggggcgtcgggcgggacagtggaagagagagggactttgcctacgtagctcgtgataagctgacccagatgctcaagtgccacgtgtttcgctgtgaggcacctgccaagaacatcgccaccagcctgcatgagatctgctctaagatcatggccgaacggcgtaatgcccgctgcttggtaaatggactctccctggaccactctaaacttgtggatgtccctttccaagtggaattcccagcgcctaagaatgagttggtccagaagttccaagtctattacctggggaatgtacctgttgctaaacctgttggggtagatgtgattaatggggccctcgagtcagtcctgtcctccagcagccgtgaacaatggaccccaagtcatgtcagtgtggcccctgctaccctcaccatcttgcaccagcagacagaggcagtgctgggagagtgtcgggtgcgtttcctctccttcctggccgtgggcagagatgtccacacgtttgcattcatcatggctgccggcccagcctccttctgctgccacatgttctggtgcgagcccaatgctgccagcctctcagaggctgtgcaggctgcgtgcatgcttcgctaccagaagtgtctggatgcccgttcccaggcctccacctcctgcctcccagcaccccctgctgagtctgtggcacggcgtgtagggtggactgtccgcaggggtgttcagtcgctgtggggctccctgaagcccaaacggctgggggcccataccccatgaagaagcccccaccttcccttccacctgattgtgttgggccccagggaactaaagggtgtgggtcagggaggggtctagaggctattcctaggcctcaggcctcccaaatatgcccctccccagtagctacggttccctgcctaggagctggggagggagagatctaatcccttcaaggaagtgataacactggagtggtaacaagaggagcaggaagcaaggccagccctggttctccatccccatgtgtttcaggtggaacaggaggaactggtccaggccaggcctcatcctcctggacccagcaggggcagaaggaggaagggactggtccaggcatgggtcccttccccctgctccatgggcacctctgctgtattgatatcactaataaagtctgtctgcactgcaaaaaaaaaaa

SEQ ID NO: 111 - DNA, 1339 bp, Homo sapiens
  CDS (17)..(529)
gcacgagcctgagaacatggacgttaatatcgccccactccgcgcctgggacgatttcttcccgggttccgatcgctttgcccggccggacttcagggacatttccaaatggaacaaccgcgtagtgagcaacctgctctattaccagaccaactacctggtggtggctgccatgatgatttccattgtggggtttctgagtcccttcaacatgatcctgggaggaatcgtggtggtgctggtgttcacagggtttgtgtgggcagcccacaataaagacgtccttcgccggatgaagaagcgctaccccacgacgttcgttatggtggtcatgttggcgagctatttccttatctccatgtttggaggagtcatggtctttgtgtttggcattacttttcctttgctgttgatgtttatccatgcatcgttgagacttcggaacctcaagaacaaactggagaatctagaacagcaggaagaaggcatcaacagactcactgactatatcagcaaagtgaaggaataaacataacttacctgagctagggttgcagcagaaattgagttgcagcttgcccttgtccagacctattttctgcttgcgtttttgaaacaggaggtgcacgtaccacccaattatctatggcagcatgcatgtataggccgaactattatcagctctgatgtttcagagagaagacctcagaaaccgaaagaaaaccaccaccctcctattgtgtctgaagtttcacgtgtgtttatgaaatctaatgggaaatggatcacacgatttctttaagggaattaaaaaaaataaaagaattacggcttttacagcaacaatacgattatcttataggaaaaaaaaaatcattgtaaagtatcaagacaatacgagtaaatgaaaaggctgttaaagtagatgacatcatgtgttagcctgttcctaatcccctagaattgtaatgtgtgggatataaattagtttttattattctcttaaaaatcaaagatgatctctatcactttgccacctgtttgatgtgcagtggaaactggttaagccagttgttcatacttcgtttacaaatataaagatagctgtttaggatattttgttacatttttgtaaatttttgaaatgctagtaatgtgttttcaccagcaagtatttgttgcaaacttaatgtcattttccttaagatggttacagctatgtaacctgtattattctggacggacttattaaaatacaaacagacaaaaaataaaacaaaacttgagttctaaaaaaaaaaaaaaaaaaaaaaaaaaaaaaaaaaaaaaaaaaatggtt

SEQ ID NO: 112 - DNA, 1530 bp, Homo sapiens
  CDS (385)..(942)
caacctctcagggcttgttctagtggctccgaaagccagtgggagcaagcgcgctttgcaaagccttgggcgccgggccttggcgcgcctttgccggatccttccggccacgggcggggcgagcccagaggagaagagccgaggggcggtgcccgggccagggggcggaggcaggcggctctggctccctctcgggacgctctttccttcttcctcttgttcctcctcctgcctctcttcgcttcgcctgcaaacgcggtgggggctgctcggcggtcaggagcagcaagagacagagcgacatgagagattggaccgcgggctgcactggagaatttactggtaggataattcatccctaaagagattgaagtgagcttcagaatggcaaaagaggagccccagagtatctcaagggacttgcaggaactgcagaagaagctgtctctgctgatagactccttccagaataactcaaagctgccccaacacagcaggatctcactggactctgatgatggagtgtccaggctgggcagtgctggctccaaggtggtggcctttatgaagtctccagtgggtcagtacttggacagccatccgtttctggccttcaccttgctggtgttcattgtcatgtcggccgttcctgttggattcttcctgctcatcgtggtgcttaccaccctggctgctctgctgggggtcataatattggaaggattggtcatctctgtgggtggcttctcactgctctgcatcctctgtggtttgggcttcgtatcactcgccatgtcggggatgatgatagcatcttatgtagtggtctccagcctcatcagctgctggttttctcccaggccactgacacagcaaaacaccagttgtgactttctgccagccatgaagtctgcagacttcgaggggctttaccaggaatgagtgactgctcagaggccggggcttcttttcaagtactgctggatcatactcaccccttgggattatggctttagaagaagggggctgagtaaggcagcaaccctaggctgagtcctctcgcttgtcacttaaccgctcggataccggacagccatataggcatgcagtagactgagaaggacccatgtgtacagccaccggagaacgtcgcgccggcaaaacagccggcatgccacagaatagccagctagacactgggcagagggacaacgtgcgatctagaaagtctcgccctggtagtacccacaaaaagcgcacgggcgctagactcgcaccggcccagaagtgagggacagagcgtagaccgaatcagtaggctagtcggatcgaagaaagcgacgagcaggaaataaaagaccaccgagaagacaagcgaaagaacgactgtagaaacgagacagtgtacgtatgctagacgacaaacgccggtcaccgtaagcaatcgcatgatgcctagatataagccgggacgagcgatcacagcggcaggcaaagtagcctaatcaggctgcgcaccgcccgtgcacg

SEQ ID NO: 113 - DNA, 3483 bp, Homo sapiens
  CDS (274)..(2097)
tcccgggtcgacgttttcgtcctccccagcccttttgcgtacctcctcaccatacacctgaaggaaggccggaacctggttgtccgagatcgctgtggcacaagtgatccttatgtgaaatttaagctgaatgggaagacgctgtacaaaagtaaagtcatatataagaacttgaacccagtatgggatgagatagttgtattgccaatccaaagccttgatcaaaagctacgtgtgaaggtatatgatcgagatttaaccacatctgatttcatgggttctgcatttgtcattctcagtgatcttgagcttaacagaacaactgaacatattttaaaactggaagatccaaacagtttagaagatgacatgggagtgatcgtcttaaatttgaacctagtggtaaaacagggtgatttcaagagacaccgttggtcaaatcggaagcgattaagtgccagcaagtcctctttgatacgcaacctacggctctctgagtccttgaaaaagaaccaactctggaacgggattataagtataactttgttggaagggaagaatgtctcaggaggaagcatgacagagatgtttgtccagttaaaactgggagatcagaggtataaaagtaagacactgtgtaagagtgcaaatccgcagtggcaggaacagtttgactttcactacttctctgacaggatgggcattttggacattgaagtgtggggaaaggacaacaaaaagcatgaggaacgtctgggcacgtgtaaagtggatatctcggcactccctctgaagcaagccaactgcctggagctgccactggacagctgtctgggggctctccttatgttggtcacacttacaccctgtgcgggggtctccgtctctgatctgtgtgtctgccccttagcagacctcagcgaaagaaagcagattacccagcgatattgcttacagaactccctgaaagatgtgaaagacgtcggcattctacaagtgaaggttttaaaggcagcagatctcttagcggcagatttctcagggaagagtgacccattttgcttgttggagttaggcaatgaccgacttcagacgcataccgtctacaaaaacctcaaccctgaatggaacaaagtttttacatttcccattaaagatatccatgatgttttggaagtgacagtgtttgatgaagatggagataaacccccagattttcttggaaaagttgccattcccttgctgtccattagagatggacaaccgaattgttatgtactaaagaataaagatttagaacaagcttttaaaggagttatttacttagagatggaccttatatataatccggtgaaagcaagtattaggacttttactccccgggaaaagcgctttgttgaagacagccgcaagctgtccaaaaagatcttatcaagagatgtggaccgtgtgaaaagaatcactatggcaatatggaatacaatgcagttccttaaaagctgcttccagtgggaatccacattaagaagtacaatagcattcgcggtatttttgatcactgtctggaattttgaactatatatgatccccttggcattgttgctgatctttgtctacaatttcatcagacctgtgaaaggcaaggtcagcagcatccaggacagccaggagagcacagacatagatgacgaggaggatgaagatgacaaggaatctgagaaaaaggggttgattgaaagaatctatatggtacaggatattgtttcaactgttcaaaacgtcttggaggaaatagcttcttttggagaaaggattaagaacacatttaactggacggtccccttcctttcatctctggcctgtttgattctggcagcagccaccatcattttgtatttcattccactgcggtacatcattttaatctggggcataaataaatttactaagaagcttcgaaatccctattccatcgacaataatgagctactagacttcctctctagggtaccgtctgatgttcaaaaggtgcagtatgcagaattgaaactctgcagcagccacagccccctgcggaagaagcgcagcgctctctagggcacacaccgactttggacagcagcacccaatattgtgtttggttgagtagaccaatgttatggctgtttcagtggtacccaaggtgtccttctgaaatgcatgccctgtggcaccctctgtatacttcctcctccttcacgtgcacagacatacacacatgtgcacacaccctcatgcatgggtgtcctagttgcgtagagggtcagcccagcgaaaagcaacaaccccaagactgtgaaagactaacatccattctgaaataggagataacaaggctgccatggatctgaacaccaccttccttgagaacagccaggagcccacttggattcaagagtgactttgaacttgttttcacacctccaacagactctcattaagattcagttatttccgctccccagccccacactcctttcagattatcgttcatgggcgtaagtctcttctcagagttaacaagtctttggtagtcatcctctgtccaaatattgtatattattaaaaggcatttttaataattaccagaattagctcaaacctttagggatctttcagccatgattattaaggatatgtatgtgaatttttgggaaacctctcggtgctggatgccagcctacagcagggtccattgctggcaatggatggcccaggaaggtccctagagatcactcacttgaaaaatgagggtcccatgaaagtatttggttgccttctgatgccacttcttctcactttactttttgcttattttcaaaatattataaaatgtcaacatataatttcagaaaggcaggtgggggtaggggagaaatgaatgaataaattctctaggtatttagaaagataagaaactgaagaccgagagactaataaggctgcttacctaattattataatcatttcatttgcctgaatgttttaagcaggaagtagaaatactttggctgcccaaatgtatcttttgttcctcttagaagtaaaataagctacatacaataaaaatttatttcagaaccccatttctagaaaataccaccccagagtcctcatttgatagcatctgtctcctgcagacctcatcattccacagtatttccctgccatgtaaaaatcctgactttgtgcgtatataaaatgtatgcaattaagtctgtttaaatgatatttaagttttaaagactgtattttgttgacacatactttgtgcagtttttatgtatgtatgtattataaaaaaagttaaggttaaaaagatctcatttaatagtgagttcactattttttttttttgtctctgggttgtaatttaataatcttcaaacaaaatgtttacgaaaaatgccaaagattctaaatcttaaaaaaaaaaaaaaaaag

SEQ ID NO: 114 - DNA, 3355 bp, Homo sapiens
  CDS (217)..(1671)
aaggatccttaattttattaatccccccccccccgaaggcccccagccgcctgtgccccgcggtgcgcgccccgctccgggacctgccgccaccgccgccccgccctcggcggcacccacacccaggcgcgcccgcgcgcgcgcccggccccgtccctgcctggaagcacagctgaagatggcgagcccggcgcctccggagcacgccgaggagggatgcccggctcctgccgccgaggagcaggcgccgccgtcgccgccaccgccccaggcatcccccgcagagcggcagcagcaggaggaggaagcgcaggaagctggggcggcggagggcgcggggttgcaggtggaggaggccgcgggccgggcggcggccgcgtaacctggctgctcggggagccggtgctgtggctgggctgccgcgccgacgagctgctgagctggaagaggccgctgcggagcctgctcggcttcgtcgctgccaacctgctgttctggttccttgcattgactccatggagagtatatcacctgatttccgtcatgatacttgggcgtgttattatgcaaataataaaggatatggttttgtctagaacaagaggtgcacagttgtggagaagcctcagtgaaagctgggaagttatcaattccaaaccagatgaaagacccaggctcagccactgtattgcagaatcatggatgaatttcagcatatttcttcaagaaatgtctctttttaaacagcagagccctggcaagttttgtctcctggtctgtagtgtgtgcacattttttacgatcttgggaagttacattcctggggttatactcagctatctactgttactgtgtgcatttttgtgtccattgtttaaatgtaatgatattggacaaaaaatttacagcaaaattaagtcagttctgctgaaactggattttggaattggagaatatattaatcagaagaaacgtgagagatctgaagcagataaagaaaaaagtcacaaagatgacagtgaattagacttttcagctctttgtcctaagattagcctcacggttgctgccaaagagttatctgtgtctgacacagacgtctcagaggtatcctggactgataatgggaccttcaacctttcagaaggatacactccacagacagacacttctgatgatcttgaccgacccagtgaggaagttttctctagagatctttcagattttccatctctagaaaatggcatgggaacaaatgatgaagatgaattaagccttggtttgcccactgagctcaagagaaagaaggaacagttggacagtggtcacagaccaagcaaagagacgcaatcagcagctggtctcacccttcctctgaacagtgaccaaacctttcacctgatgagcaacctggctggggatgttatcacagctgcagtgactgcagctatcaaagaccagttagagggtgtgcagcaagcactttctcaggctgcccccatcccagaagaggacacagacactgaagaaggtgatgactttgaactacttgaccagtcagagctggatcaaattgagagtgaattgggacttacacaagaccaggaagcagaagcacagcaaaataagaagtcttcaggtttcctttcaaatctgctgggaggccattaatctaggaatcagcttgcaacagagcacaaaaaacaccaaaaaaatttcaaacaagaaaaaaaaaaaaaaaaggaaaagaaaaaaattgaactgtaagctttaatgattactttagatttgttttattttccctcctgcagtgaattaattggatatatatcagctgacactgatagattgatatttctgatcgttatttttgtgtaataagcatggaaatgaactttatacacaccactgtgttgtcagagataaatattaggggttgtttttaaagcaaaaaaaaaaaaaaaaaaaccaaactattaaaatcctcctataaatattctttttctttacagtttttcaagcatgcaaaacagtttattgtaacttactgaaaaatattaacaattaattgtgaatacatgctgttaccagcttccttattcctaatacctggaaaatttttttttcaacggatagattttgatgtaaaaaagaccgaaattatcaaggtatcttagttgaaggacttgggaaatactatcaaaattaatttcttaggaaaaaatttaaaagtatatttaagtactctggatagactgaaacgtttccatgttatttctgcagttgtagacttaggcttatttgtaaagaagcatgctccattgactgccatctctagtcttgcagtgggtggtattaacccatagaaagcaagcagttgtgtatcacatagacaatggttatgatgtaaacagattcagttgttttgttgttcattcgtcatatgtttgtgatagggatgttgggagcacagctctattctgcctgctcagacttaagttagacccttatcttttatattatgtcatgaaaaaagtctcctaaaattgtgaaactagttcttgatgagtgatgtgatcatcagcaataaagatataataactctgttttcttagcctgtatagaggagaggaacctgcttggctttaaaatatatttatttgccatttaagtataaatatggaatctgtttcttattgggaagatagaatatatatattttcctttaaactttttaaggtcacttttaaataaccaaatttgatttatggtttttaacaaaggactaaagagctgaaaccaacctagttttgtttttgtgatataaactttaagtgtcgagggaccatgccagcaactaccaaaaatctcttaaatcttcaggtacagctggcattttggcagatgcatagagacatctgagaccctcagaaaggaaggataatccaagaatataggaaatctgtgttctcttcctttcattttatcccttatatttctaaagactaattataagtaatctgacattttaatgtagctactcttatttattttttctttctgaggtattaaaatatctggactgagttttgccaaatgttaaagggagaagagttactgaagactttgaacacttgctttttgtgattgcttatgtcattagtgcctcatgactgtgtttgatgtcctttattgatacaaagtgagcctgtgccttcattatcttgcccattttaatacaaatggaaacctggtgtttgaaaatctctgaactgtgtgggttttggaggaatatacctgaattttattcaataacagtttctggacaggaagaaaaatacagttacatatttat

SEQ ID NO: 115 - DNA, 3355 bp, Homo sapiens
  CDS (217)..(1671)
aaggatccttaattttattaatccccccccccccgaaggcccccagccgcctgtgccccgcggtgcgcgccccgctccgggacctgccgccaccgccgccccgccctcggcggcacccacacccaggcgcgcccgcgcgcgcgcccggccccgtccctgcctggaagcacagctgaagatggcgagcccggcgcctccggagcacgccgaggagggatgcccggctcctgccgccgaggagcaggcgccgccgtcgccgccaccgccccaggcatcccccgcagagcggcagcagcaggaggaggaagcgcaggaagctggggcggcggagggcgcggggttgcaggtggaggaggccgcgggccgggcggcggccgcggtaacctggctgctcggggagccggtgctgtggctgggctgccgcgccgacgagctgctgagctggaagaggccgctgcggagcctgctcggcttcgtcgctgccaacctgctgttctggtccttgcattgactccatggagagtatatcacctgatttccgtcatgatacttgggcgtgttattatgcaaataataaaggatatggttttgtctagaacaagaggtgcacagttgtggagaagcctcagtgaaagctgggaagttatcaattccaaaccagatgaaagacccaggctcagccactgtattgcagaatcatggatgaatttcagcatatttcttcaagaaatgtctctttttaaacagcagagccctggcaagttttgtctcctggtctgtagtgtgtgcacattttttacgatcttgggaagttacattcctggggttatactcagctatctactgttactgtgtgcatttttgtgtccattgtttaaatgtaatgatattggacaaaaaatttacagcaaaattaagtcagttctgctgaaactggattttggaattggagaatatattaatcagaagaaacgtgagagatctgaagcagataaagaaaaaagtcacaaagatgacagtgaattagacttttcagctctttgtcctaagattagcctcacggttgctgccaaagagttatctgtgtctgacacagacgtctcagaggtatcctggactgataatgggaccttcaacctttcagaaggatacactccacagacagacacttctgatgatcttgaccgacccagtgaggaagttttctctagagatctttcagattttccatctctagaaaatggcatgggaacaaatgatgaagatgaattaagccttggtttgcccactgagctcaagagaaagaaggaacagttggacagtggtcacagaccaagcaaagagacgcaatcagcagctggtctcacccttcctctgaacagtgaccaaacctttcacctgatgagcaacctggctggggatgttatcacagctgcagtgactgcagctatcaaagaccagttagagggtgtgcagcaagcactttctcaggctgcccccatcccagaagaggacacagacactgaagaaggtgatgactttgaactacttgaccagtcagagctggatcaaattgagagtgaattgggacttacacaagaccaggaagcagaagcacagcaaaataagaagtcttcaggtttcctttcaaatctgctgggaggccattaatctaggaatcagcttgcaacagagcacaaaaaacaccaaaaaaatttcaaacaagaaaaaaaaaaaaaaaaggaaaagaaaaaaattgaactgtaagctttaatgattactttagatttgttttattttccctcctgcagtgaattaattggatatatatcagctgacactgatagattgatatttctgatcgttatttttgtgtaataagcatggaaatgaactttatacacaccactgtgttgtcagagataaatattaggggttgtttttaaagcaaaaaaaaaaaaaaaaaaaccaaactattaaaatcctcctataaatattctttttctttacagtttttcaagcatgcaaaacagtttattgtaacttactgaaaaatattaacaattaattgtgaatacatgctgttaccagcttccttattcctaatacctggaaaatttttttttcaacggatagattttgatgtaaaaaagaccgaaattatcaaggtatcttagttgaaggacttgggaaatactatcaaaattaatttcttaggaaaaaatttaaaagtatatttaagtactctggatagactgaaacgtttccatgttatttctgcagttgtagacttaggcttatttgtaaagaagcatgctccattgactgccatctctagtcttgcagtgggtggtattaacccatagaaagcaagcagttgtgtatcacatagacaatggttatgatgtaaacagattcagttgttttgttgttcattcgtcatatgtttgtgatagggatgttgggagcacagctctattctgcctgctcagacttaagttagacccttatcttttatattatgtcatgaaaaaagtctcctaaaattgtgaaactagttcttgatgagtgatgtgatcatcagcaataaagatataataactctgttttcttagcctgtatagaggagaggaacctgcttggctttaaaatatatttatttgccatttaagtataaatatggaatctgtttcttattgggaagatagaatatatatattttcctttaaactttttaaggtcacttttaaataaccaaatttgatttatggtttttaacaaaggactaaagagctgaaaccaacctagttttgtttttgtgatataaactttaagtgtcgagggaccatgccagcaactaccaaaaatctcttaaatcttcaggtacagctggcattttggcagatgcatagagacatctgagaccctcagaaaggaaggataatccaagaatataggaaatctgtgttctcttcctttcattttatcccttatatttctaaagactaattataagtaatctgacattttaatgtagctactcttatttattttttctttctgaggtattaaaatatctggactgagttttgccaaatgttaaagggagaagagttactgaagactttgaacacttgctttttgtgattgcttatgtcattagtgcctcatgactgtgtttgatgtcctttattgatacaaagtgagcctgtgccttcattatcttgcccattttaatacaaatggaaacctggtgtttgaaaatctctgaactgtgtgggttttggaggaatatacctgaattttattcaataacagtttctggacaggaagaaaaatacagttacatatttat

SEQ ID NO: 116 - DNA, 651 bp, Homo sapiens
  CDS (128)..(502)
gcacgtgggaaaggaggtctcactgagcaccgtcccagcatccggacaccacagcggcccttcgctccacgcagaaaaccacacttctcaaaccttcactcaacacttccttccccaaagccagaagatgcacaaggaggaacatggggtggctgtgctgggggcaccccccagcaccatccttccaaggtccaccgtgatcaacatccacagcgagacctccgtgcccgaccatgtcgactggtccctgttcaacaccctcttcttgaactgctgctgtctgggcttcatagcattcgcctactccgtgaagtctagggacaggaagatggttggcgacgagaccggagcccaggcctatgcctacaccgacaagtgcctgaacatctgggccctgaatctgggcatactcatgaccattggattcatcctgttactggtattcggatctgtgacagactaccatattatgctacagataatacaggaactgagttactagtagccgtccatagcctggaacctttgcactccactgtgcaatgcttgacctgcacgctgaagcttgtgccccttgccacttggtactgccactagatacagcagtgatacccacacacctgtttacagggcactcgtgcacgtgcttgt

SEQ ID NO: 117 - DNA, 1634 bp, Homo sapiens
  CDS (324)..(1634)
tgcaagacatttcaggcaagaggaccactgtgacatattaggagaatcgcgagaagaatgtgggtttgtgcagaagggtttcaaagattctagtgcatagtaataagtaaatacatacaagacagagtcctaaagaatggatgaggaaggtgagccagaaggattcctgtcactgaggaatatgattgtcttccccacacagagcctggggacccactcagccaaatttctccaacctccccaggcaccaaaatgtgagtcatcccggcattcccctgccaccatctgtcacaaggtccccaaaggatgtggagagagtctccatggactctgggacagtggaaagggaaggaggaggcaggaagaaaacagaaagagccattccctcaggggctacaaagactataagtccccctgttactacctctggactagggcatgtccctgctacctccccctgccagtctcatgccacaggctgcactgaagctgctctgctgaaagaactccccacccacctccactatttagatggagaaatggagaggcactcaaagcacctctgctcctcactcggtaaagtacaggatgctttcttctccctggccatggccttgccattgctcttatctccctcctgctttgcctcttctcagtctctgtccagtaggatgaactcagagaacctcacccgggccgcggttgcccctgctgaattcgtcctcctgggcatcacaaatcgctgggacctgcgtgtggccctcttcctgacctgcctgcctgtctacctggtgagcctgctgggaaacatgggcatggcgctgctgatccgcatggatgcccggctccacacacctatgtacttcttcctggccaacctctccctgctggatgcctgctattcctccgccatcggccccaagatgctagtggacctgctgctgccccgagccaccatcccttacacagcctgtgccctccagatgtttgtctttgcaggtctggctgatactgagtgttgcttgctggcagccatggcctatgaccgctacgtggccatcagaaacccacttctctatacaacagctatgtcgcagcgtctatgcctggccttgctgggagcatcaggcctgggtggggcagtgagtgcctttgttcacacaaccctcaccttccgcctgagcttctgccgctcccggaagatcaatagcttcttctgcgatatccctccactgctggccatctcgtgcagtgacaccagtctcaatgaactccttctcttcgccatctgtggcttcatccagacagccacggtgttagctatcacggtgtcttatggcttcatcgctggggctgtgatccacatgcgctcggtcgagggcagtcggcgagcagcctccaccggtggttcccacctcacagccgtggccatgatgtacgggacactcattttcatgtacctgcgccccagctccagctatgccctggacactgacaagatggcctctgtgttctataccctggtcatcccgtctctcaacccactcatctacagcctccgcaataaggaggtcaaggaggccctcaggcagacctggagccgattccactgtccagggcaggggtcccagtga

SEQ ID NO: 118 - DNA, 3341 bp, Homo sapiens
  CDS (69)..(3341)
gacccgcggggcgcgcggccatcctgcgggcggcggcggcgggcgaggcgcctgcagccgggcgcaagatgatgaagtttcggttccggcggcagggcgccgacccgcagcgcgagaagctcaagcaggagcttttcgccttcaacaagactgtggagcatggcttccccaatcagcccagcgccctggccttcgacccggaacttcgcatcatggccatcggcaccaggtctggggctgtcaagatgtatcctttgcaggacagctatggtgcacctggcgtggagttcacaggcctgcaccgggatgcagccactgtcacacagatgcacttcttgaccggccagggccgcctcctgtccctgcttgatgacagcagtctgcatctctgggagattgtccaccataatggctgtgcccacctggaagaagcactcagtttccagctgcccagccggcccggctttgatggtgccagtgctccgctcagccttacccgagtcacagtggtcctgctggtggctgccggcgacatagcagccctgggcactgagggcagcagtgtcttcttcctggatgttaccaccctgaccctgctcgaggggcagacgcttgccccaggcgaggttctgcgcagcgtgccagacgactaccgctgtgggaaggcactgggccccgtggagtcactccagggacacctgcgggaccccacaaagattctcattggctacagccggggcctgctggtcatctggaaccaggcctcgcagtgtgtggaccacatcttcctggggaaccagcagctggagagcctatgctgggggcgtgatagcagcactgtggtcagctcacacagcgatggcagctatgctgtctggtctgtggatgccggcagcttcccaacgctgcagcccacggtagccaccacaccttacggcccctttccctgcaaggccattaacaagattctgtggcggaactgtgaatctgggggccactttatcatcttcagcggtggcatgccccgtgccagctatggtgaccgccactgtgtaagtgtgcttcgagccgagacattggtgacgctggacttcacttcccgcatcatcgacttcttcacagtgcacagcacacggcccgaggatgaatttgatgacccccaggccctggctgtgctgctggaagaggagctggtggtgctggacctgcagactcctggctggccagctgtgcctgccccatacctggccccgctgcactcctctgcaatcacttgctcggcccacgtggccagtgtccccgccaagctgtgggcccgcattgtgagcgctggcgagcagcagagcccccagcctgtctccagtgccttgagctggcccatcactgggggccgaaacctggcccaggagccgtcacagcgagggctgctgctgacgggccatgaggacggcaccgtgaggttctgggatgcctcgggtgtggcgctgcggccgctctataagctgagcacagctggcctcttccagacagactgtgagcacgctgacagcctggcccaggctgccgaggacgactggccacccttccgcaaggtgggctgcttcgatccctacagtgacgatccccggcttggcgtgcagaaggttgctctctgcaagtatacagcccagatggtggtggctggcactgcaggccaggtgctggtactggagcttagtgatgtgccggtggagcaggcggtcagcgtggccatcatagacctcctccaggaccgcgagggcttcacatggaagggccacgagcggctgagcccacgcacggggccgctgccctggcctgctggcttccagccccgtgtcctggtgcagtgcctgccgccagctgctgtaaccgctgtcacactccacaccgagtggagcctcgtggcttttggcaccagtcatggctttggcctcttcgactaccagcgcaagagccctgtgctggccaggtgcactcttcaccccaatgactccctggccatggagggtccgctctcccgggtgaagtctctcaagaagtcactgcgccagtctttccggcgcattcgcaagagtcgtgtctctggcaagaagcgggctgctaatgccagcagcaagttgcaggaagccaatgcacagctggctgagcaggcctgcccccacgacgtggagatgacgcccgtgcagcgccgcattgagccccgctctgccgatgactccttgtcgggtgtcgtgcgttgcctatactttgccgacacattccttcgagatggggcccaccacgggcccaccatgtgggctggcaccaactcaggctctgtgttcgcctatgcactggaggtgccggcagcagcagtgggtggtgagaagcggcctgagcaagcggtggaggccgtgctgggcaaggaggtgcagctgatgcaccgggcgcctgtggtggccattgccgtgttggacgggcgtggccgcccactgcccgagccctacgaggcctcacgggacctggcgcaggcacctgacatgcagggtggtcacgctgtgctcatcgcatctgaggagcagttcaaggtgttcacactgcccaaggtgagcgcgaagaccaagttcaagctgacggcccatgagggctgtcgtgtgcgcaaggtggcactggccacgtttgccagtgtggcctgcgaggactatgctgagacctgcctggcctgcctcaccaacctgggtgacgtccacgtcttctcggtgcctggcctgcggccccaggtgcactattcctgcatccggaaggaggacatcagcggcatcgcttcgtgcgtctttacgcgccatggccagggcttttacctgatatccccatcagaatttgaacgcttctccctaagtgcccggaacatcacagagccgctctgctctctggacattaactggccccgcgatgccacccaggccagttacaggatccgagagtcacccaagctgagccaggctaacgggaccccaagcatcctgctggccccacagagccttgatggaagccctgatccagcccacagcatgggacctggcccccaggtgcagagggtgctaagggtcctggtaggggctgatgacttgctccctgtagacaccccggagccacccgaggctgcactctcacccatgtccatcgactcagccaccagtgctgacaccacgctggacacgacaggggacgtcacagtggaagatgtgaaggatttcctgggctcctctgaggagtcagagaagaacctgaggaacctggcagaagacgaggcccacgcctgtgccatcctgatcaaatga

SEQ ID NO: 119 - DNA, 718 bp, Homo sapiens
  CDS (35)..(718)
agaaagttacctcttacaaaagcaacaggcccatatggttttactgagtattctacaaaccgtcaaagaccagctaagctcatatggttattggcaggattcagtttctcatggggcgttggacaagggcctcagttcttcgctgactgttgcccactctcagttccttgaaatgtgcctcttcagtgtggcagtgttcttcatcgaagcatgcaagccacaaggccccagggagagccagcaagatggcagtcacgctagtcttcaaagcataacaccagtagccttcacagccagcggccttgtaggtgaagcaagctattggtacaggtccacattgcctagtgctgtggctggaaggagtcagtttaatgcgaggcaaaccacgtttatcaacacagaggtcacaagatactttatacaggagcattcccactggcatcaggtcagtgcccctctgggatggagctcccagaggaaggagcaagcagccatctttgctgttctgcagcctgcattggtgatgcctccagcaagggcacagaactgggctgaggctgagatggatgaactgacagaagtaggcttcagaaggtgggtaataacgaacttcactgagctaaaggagcatcttctaacccaatgcaaagaagctaagaaccctgataaaacattaaacaagctgttaaccagaataagcagtttagtgggaacataa

SEQ ID NO: 120 - DNA, 1998 bp, Homo sapiens
  CDS (1)..(1998)
atggccggccacacgcagcagccgagcgggcgcgggaaccccaggcctgcgccctcgccctccccagtcccagggaccgtccccggcgcctcggagcgggtggcgctcaagaaggagatcgggctgctgagcgcctgcaccatcatcatcggccacagggaggctgcctggctcctttctccccagaaaggggccctggtggtggtggtggtggtggtggtggtggtggtggtggtggtggtgatggtagaggtggtggtggtgggagtggagaaggccaactccactatcaccctccttttccaggacagactctatgccctcggtgtgctccaggaccccaagggaagccccaactataatttcggggacctgtcagtcctgggcacactcatccatttattcaaccactacatactgaacggtgtcaggcactggcttacatgccagagacaccatgggggggtcaagacagacaaaatccatcttctggtgtgggagtcccgcaacaagatgaacaagctgaatgccctagtgcagatctctggtgaagttaccggattcatgtgcacagatgggaacatcatcggctcgggcatcttcatctcgcccaagggggtcctggagcactcaggctccgtgggtctggccctgttcgtctgggtcctgggtgggggcgtgacggctctgggctccctctgctatgcagagctgggagtcgccatccccaagtctggcggggactacgcctacgtcacagagatcttcgggggcctggctggctttctgctgctctggagcgccgtcctcatcatgtaccccaccagccttgctgtcatctccatgaccttctccaactacgtgctgcagcccgtgttccccaactgcatcccccccaccacagcctcccgggtgctgtccatggcctgcctgatgctcctgacatgggtgaacagctccagtgtgcgctgggccacgcgcatccaggacatgttcacaggcgggaagctgctggccttgtccctcatcatcggcgtgggccttctccagatcttccaaggacacttcgaggagctgaggcccagcaatgcctttgctttctggatgacgccctccgtgggacacctggccctggccttcctccagggctccttcgccttcagtggctggaacttcctcaactatgtcaccgaggagatggttgacgcccgaaagaacctacctcgcgccatcttcatctccatcccactggtgaccttcgtgtacacgttcaccaacattgcctacttcacggccatgtccccccaggagctgctctcctccaatgcggtggctgtgaccttcggggagaagctgctgggctacttttcttgggtcatgcctgtctccgtggctctgtcaaccttcggagggatcaatggttacctgttcacctactccaggctgtgcttctctggagcccgcgaggggcacctgcccagcctgctggccatgatccacgtcagacactgcacccccatccccgccctcctcgtctgttgcggggccacagccgtcatcatgctcgtgggcgacacgtacacgctcatcaactatgtgtccttcatcaactacctctgctacggcgtcaccatcctgggcctgctgctgctgcgctggaggcggcctgcactccacaggcccatcaaggtgaaccttctcatccccgtggcgtacttggtcttctgggccttcctgctggtcttcagcttcatctcagagcctatggtctgtggggtcggcgtcatcatcatccttacgggggtgcccattttctttctgggagtgttctggagaagcaaaccaaagtgtgtgcacagactcacagagtccatgacacactggggccaggagctgtgtttcgtggtctacccccaggacgcccccgaagaggaggagaatggcccctgcccaccctccctgctgcctgccacagacaagccctcgaagccacaatga

SEQ ID NO: 121 - DNA, 1534 bp, Homo sapiens
  CDS (133)..(1512)
ggcttttagatgggtctggagcttggaggagaagtctgaactaaggataaactaaagagaggccaatgagacttgaaccctgagcctaagttgtcaccagcaggactgatgtgcacacagaaggaatgaagtatggatgtgaaagaacgcaggccttactgctccctgaccaagagcagacgagagaaggaacggcgctacacaaattcctccgcagacaatgaggagtgccgggtacccacacagaagtcctacagttccagcgagacattgaaagcttttgatcatgattcctcgcggctgctttacggcaacagagtgaaggatttggttcacagagaagcagacgagttcactagacaaggacagaattttaccctaaggcagttaggagtttgtgaaccagcaactcgaagaggactggcattttgtgcggaaatggggctccctcacagaggttactctatcagtgcagggtcagatgctgatactgaaaatgaagcagtgatgtccccagagcatgccatgagactttggggcaggggggtcaaatcaggccgcagctcctgcctgtcaagtcggtccaactcagccctcaccctgacagatacggagcacgaaaacaagtccgacagtgagaatgagcaacctgcaagcaatcaaggccagtctaccctgcagcccttgccgccttcccataagcagcactctgcacagcatcatccatccatcacttctctcaacagaaactccctgaccaatagaaggaaccagagtccggccccgccggctgctttgcccgccgagctgcaaaccacacccgagtccgtccagctgcaggacagctgggtccttggcagtaatgtaccactggaaagcaggcatttcctattcaaaacaggaacaggtacaacgccactgttcagtactgcaaccccaggatacacaatggcatctggctctgtttattcaccacctactcggccactacctagaaacaccctatcaagaagtgcttttaaattcaagaagtcttcaaagtactgtagctggaaatgcactgcactgtgtgccgtaggggtctcggtgctcctggcaatactcctgtcttattttatagcaatgcatctctttggcctcaactggcagctacagcagactgaaaatgacacatttgagaatggaaaagtgaattctgataccatgccaacaaacactgtgtcattaccttctggagacaatggaaaattaggtggatttacgcaagaaaataacaccatagattccggagaacttgatattggccgaagagcaattcaagagattcctcccgggatcttctggagatcacagctcttcattgatcagccacagtttcttaaattcaatatctctcttcagaaggatgcattgattggagtatatggccggaagaagttaccgccttcccatactcaggtaagactaggctttcttatcaataaaataaaaactgccagttgcattttttgaaattaaaaaaaaaaaaaaaaaa

SEQ ID NO: 122 - DNA, 643 bp, Homo sapiens
  CDS (8)..(463)
cgcaaacatggcagcgcagaaggaccagcagagagatgccgaggcggaagggctgagcggcacgaccctgctgccgaagctgattccctccggtgcaggccgggagtggctggagcggcgccgcgcgaccatccggccctggagcaccttcgtggaccagcagcgcttctcacggccccgcaacctgggagagctgtgccagcgcctcgtacgcaacgtggagtactaccagagcaactatgtgttcgtgttcctgggcctcatcctgtactgtgtggtgacgtcccctatgttgctggtggctctggctgtctttttcggcgcctgttacattctctatctgcgcaccttggagtccaagcttgtgctctttggagccaccctggtggtcatcggctcccacgctgccttccaccagattgaggctgtggacggggaggagctgcagatggaacccgtgtgaggtgtcttctgggacctgccggcctcccgggccagctgccccacccctgcccatgcctgtcctgcacggctctgctgctcgggcccacagcgccgtcccatcacaagcccggggagggatcccgcctttgaaaataaagctgttatgggtgtcattcagaaaaaaaaaaaaaaaaacatg

SEQ ID NO: 123 - DNA, 1392 bp, Homo sapiens
  CDS (400)..(1392)
atgcaccgggccggcgggcaggcgggcgaactcgcggggccgcttctgcgtgtgcacctggccgccgcccgggagcctgccacgggccgggaatggccgctgctccgccctctgagaggtgctccaggctccctggggacggaggtttacacgtccccgtgccgcgctcccagatctgggcgtaagtgtggacctttgtgtaccagagagaacatcatggtggctttcaaaggggtctggactcaagctttctggaaagcagtcacagcggaatttctggccatgcttatttttgttctcctcagcctgggatccaccatcaactggggtggaacagaaaagcctttaccggtcgacatggttctcatctccctttgctttggactcagcattgcaaccatggtgcagtgctttggccatatcagcggtggccacatcaaccctgcagtgactgtggccatggtgtgcaccaggaagatcagcatcgccaagtctgtcttctacatcgcagcccagtgcctgggggccatcattggagcaggaatcctctatctggtcacacctcccactggtagtgccacagtagatttatgctgcacaaaagctgtgagccttctgcctggggaacccccgcaaaaggtcccaacaggagtctgtggacccttgccagcagggacaacaggattacttttaggaaagtctagtttaggtttaaaaggggtacaaatacatacaggagtcattgattcagattataatggagaaattcaaattgttgtatctacttctgttccctggaaagcagagccaggagaacacatagcacagttcctgattgtgccatttgtggaaatgggaaaaagtgaaattaaacgaacaggaggatttggaagcacaaataaacaaggcaaagcagcttattgggtaaatcaaattactgataaacatcctacctgtgaaataactattcagggaaagaaatgtaaaggtttggtagatacaggagcagacatttcaatcatttctctacagcactggctgtccgtgtggccaattcaacctgcacaatttaacatagttggagttggtaaagcccctgaagtatatcaaagtagttatattttgcatcgtgaagggcctgatggacaacctgggactattcaaccaattataacttctgtacctataaatttatgggggagagatttattacaacaatggggaacacaagttctaattccagaacaattatatagccctcaaaatcaacatatgatgcatgaaatggggtatgtccctggtatgggactagaaaaaaatttgcaaggtttgaaagaaccgcttcaagcagaaagacaaaattcccgccaaagattaggatatcatttttga

SEQ ID NO: 124 - DNA, 1140 bp, Homo sapiens
  CDS (100)..(660)
tcgccgttatggccactgggctgggcggctgaccgccgggctaggaaagggcccagggccccgaatctcggtggccgctgctccagcgcggcctgcgccatggcctcctccgccgcctcctcggagcatttcgagaagctgcacgagatcttccgcggcctccatgaagacctgtctttccgaaaccccatgatgtctaagcttcgaaactaccggaaggaccttgctaaactccatcgggaggtgagaagcacacctttgacagccacacctggaggccgaggagacatgaaatatggcatatatgctgtagagaatgagcatatgaatcggctacagtctcaaagggcaatgcttctgcagggcactgaaagcctgaaccgggccacccaaagtattgaacgttctcatcggattgccacagagactgaccagattggctcagaaatcatagaagagctgggggaacaacgagaccagttagaacgtaccaagagtagactggtaaacacaagtgaaaacttgagcaaaagtcggaagattctccgttcaatgtccagaaaagtgacaaccaacaagctgctgctttccattatcatcttactggagctcgccatcctgggaggcctggtttactacaaattctttcgcagccattgaacttctatagggaagggtttgtggaccagaactttgaccttgtgaatgcatgatgttagggatgtggatagaataagcatattgctgctgtgggctgacagttcaaggatgcactgtatagccaggctgtgggaggagggaggaaagatgaaaaaccacttaaatgtgaaggaacaacagcaacaagaccagtatgatatacccacggtaagcaaaaacacaacaataaccacaaaacaaagagaaaagaacgagggcggcgccaaccagaaaaccccccagaggagcaacagaaaccgcagcacacgtatctgacaacaggggcccaccgtgaagcgcactatagacaacgacggcgcgccaaaacaaccagacagcggcaacgaactgaggaaccgacgacaaccacagggcagacaaaaggaaacgacaacagacaccagaacaaaacagcgaccacacgtgcacaacaagataaac

SEQ ID NO: 125 - protein, 180 aa, Homo sapiens
MVHVSNRSIQGMNILFSSWAVVLMVMGITLDKWVELISEDERAKMNHSPWMMCCPALWPEDDLKVVRIMMTSSLGLSFLLNLILGMKFTYLIPQNKYIQLFTTILSFFSGVLSLLECKLSTSSCTCLNIHKSDNECKESENSIEDISLPECTAMPRSIVRAHTVNSLNKKVQTRHVTWAL

SEQ ID NO: 126 - protein, 1101 aa, Homo sapiens
MQFGFVAIYLSESFIRGFMTAAGLQILISVLKYIFGLTIPSYTGPGSIVFTFIDICKNLPHTNIASLIFALISGAFLVLVKELNARYMHKIRFPIPTEMIVVVVATAISGGCKMPKKYHMQIVGEIQRGFPTPVSPVVSQWKDMIGTAFSLAIVSYVINLAMGRTLANKHGYDVDSNQEMIALGCSNFFGSFFKIHVICCALSVTLAVDGAGGKSQSVLGALIAVNLKNSLKQLTDPYYLWRKSKLDCLVNAPDMSQPRPRYVVDRAAYSLTLFDDEFEKKDRTYPVGEKLRNAFRCSSAKIKAVVFGLLPVLSWLPKYKIKDYIIPDLLGGLSGGSIQVPQGMAFALLANLPAVNGLYSSFFPLLTYFFLGGVHQMVPGTFAVISILVGNICLQLAPESKFQVFNNATNESYVDTAAMEAERLHVSATLACLTAIIQMGLGFMQFGFVAIYLSESFIRGFMTAAGLQILISVLKYIFGLTIPSYTGPGSIVFTFIDICKNLPHTNIASLIFALISGAFLVLVKELNARYMHKIRFPIPTEMIVVVVATAISGGCKMPKKYHMQIVGEIQRGFPTPVSPVVSQWKDMIGTAFSLAIVSYVINLAMGRTLANKHGYDVDSNQEMIALGCSNFFGSFFKIHVICCALSVTLAVDGAGGKSQVASLCVSLVVMITMLVLGIYLYPLPKSVLGALIAVNLKNSLKQLTDPYYLWRKSKLDCCIWVVSFLSSFFLSLPYGVAVGVAFSVLVVVFQTQFRNGYALAQVMDTDIYVNPKTYNRAQDIQGIKIITYCSPLYFANSEIFRQKVIAKTGMDPQKVLLAKQKYLKKQEKRRMRPTQQRRSLFMKTKTVSLQELQQDFENAPPTDPNNNQTPANGTSVSYITFSPDSSSPAQSEPPASAEAPGEPSDMLASVPPFVTFHTLILDMSGVSFVDLMGIKALAKLSSTYGKIGVKVFLVNIHAQVYNDISHGGVFEDGSLECKHVFPSIHDAVLFAQANARDVTPGHNFQGAPGDAELSLYDSEEDIRSYWDLEQALAAMDKPPAHSTPPTSALSLAAEGHLDFQLLRVSQKQKDKYNCAGLLYKLQKVSQSPHGSVSDGVRLSRT

SEQ ID NO: 127 - protein, 202 aa, Homo sapiens
MELSDVTLIEGVGNEVMVVAGVVVLILALVLAWLSTYVADSGSNQLLGAIVPGLITVRLKFLNDTEELAVARPEDTVGALKSKYFPGQESQMKLIYQGRLLQDPARTLRSLNITDNCVIHCHRSPPGSAVPGPSASLAPSATEPPSLGVNVGSLMVPVFVVLLGVVWYFRINYRQFFTAPATVSLVGVTVFFSFLVFGMYGR

SEQ ID NO: 128 - protein, 157 aa, Homo sapiens
MATAAGATYFQRGSLFWFTVITLSFGYYTRMVKSEASNAATAYFRPARPLPSLVTVLGLGYFAWVVFWPQSIPYQNLGPLGPFTQYLVDHHHTLLCNGYWLAWLIHVGESLYAIVLCKHKGITSGRAQLLWFLQTFFFGIASLTILIAYKRKRQKQT

SEQ ID NO: 129 - protein, 155 aa, Homo sapiens
MSLGFLYLSECFHGSVLHWSTEDTRSCGAQGGGPPLPPRGMAGTVLGVGAGVFILALIWVAVLLLCVLLSRASGAARFSVIFLFFGAVIITSVLLLFPRAGEFPAPEVEVKIVDDFFIGRYVLLAFLSAIFLGGLFLVLIHYVLEPIYAKPLHSY

SEQ ID NO: 130 - protein, 500 aa, Homo sapiens
MSVVLVLLPTLLLVMLTGAQRACPKNCRCDGKIVYYIPENISGGSQGLSLRFNSIQKLKSNQFAGLNQLIWLYLDHNYISSVDEDAFQGIRRLKELILSSNKITYLHNKTFHPVPNLRNLDLSYNKLQTLQSEQFKGLRKLIILHLRSNSLKTVPIRVFQDCRNLDFLDLGYNRLRSLSRNAFAGLLKLKELHLEHNQFSKINFAHFPRLFNLRSIYLQWNRIRSISQGLTWTWSSLHNLDLSGNDIQGIEPGTFKCLPNLQKLNLDSNKLTNISQETVNAWISLISITLSGNMWECSRSICPLFYWLKNFKGNKESTMICAGPKHIQGEKVSDAVETYNICSEVQVVNTERSHLVPQTPQKPLIIPRPTIFKPDVTQSTFETPSPSPGFQIPGAEQEYEHVSFHKIIAGSVALFLSVAMILLVIYVSWKRYPASMKQLQQHSLMKRRRKKARESERQMNSPLQEYYVDYKPTNSETMDISVNGSGPCTYTISGSRECEV

SEQ ID NO: 131 - protein, 778 aa, Homo sapiens
MKPFQLDLLFVCFFLFSQELGLQKRGCCLVLGYMAKDKFRRMNEGQVYSFSQQPQDQVVVSGQPVTLLCAIPEYDGFVLWIKDGLALGVGRDLSSYPQYLVVGNHLSGEHHLKILRAELQDDAVYECQAIQAAIRSRPARLTVLVPPDDPVILGGPVISLRAGDPLNLTCHADNAKPAASIIWLRKGEVINGATYSKTLLRDGKRESIVSTLFISPGDVENGQSIVCRATNKAIPGGKETSVTIDIQHPPLVNLSVEPQPVLEDNVVTFHCSAKANPAVTQYRWAKRGQIIKEASGEVYRTTVDYTYFSEPVSCEVTNALGSTNLSRTVDVYFGPRMTTEPQSLLVDLGSDAIFSCAWTGNPSLTIVWMKRGSGVVLSNEKTLTLKSVRQEDAGKYVCRAVVPRVGAGEREVTLTVNGPPIISSTQTQHALHGEKGQIKCFIRSTPPPDRIAWSWKENVLESGTSGRYTVETISTEEGVISTLTISNIVRADFQTIYNCTAWNSFGSDTEIIRLKEQGSEMKSGAGLEAESVPMAVIIGVAVGAGVAFLVLMATIVAFCCARSQRNLKGVVSAKNDIRVEIVHKEPASGREGEEHSTIKQLMMDRGEFQQDSVLKQLEVLKEEEKEFQNLKDPTNGYYSVNTFKEHHSTPTISLSSCQPDLRPAGKQRVPTGMSFTNIYSTLSGQGRLYDYGQRFVLGMGSSSIELCEREFQRGSLSDSSSFLDTQCDSSVSSSGKQDGYVQFDKASKASASSSHHSQSSSQNSDPSRPLQRRMQTHV

SEQ ID NO: 132 - protein, 190 aa, Homo sapiens [sequence omitted]

SEQ ID NO: 133 - protein, 518 aa, Homo sapiens
MLCASFLGLGLSVAIVGPTFQDLATNVNRNISSLSFIFVGRALGYLSGSVIGGFLVDVMNYFLLLGISMSATTVGLYLVPFCKTAILLTVMMSIFGVSIGILDTGGNVLILAIWGDKGAPHMQALHFSFALGAFLAPLLAKLALGPTASAENHTESDFHPALNQSSDADSEALFGVPNDKNLLWAYAVIGTYMFLVSVIFFCLFLKNSSKQEKARASAETFRRAKYHNALLCLLFLFFFFYVGAEVTYGSYVFSFATTHAGMKESEAAGLNSIFWGTFAACRGLAIFFATCLQPGTMIVLSNIGSLTSSLFLVLFDKNPICLWIATSVYGASMATTFPSGVSWIEQYTTIHGKSAAFFVIGASLGEMAIPAVIGILQGKYPDLPVVLYTSLGASIATGILFPVLYKLATSPLDRQRKEDRKSEDQKALLSSSGLNEYEEENEEEDAEKWNEMDFEMIETNDTMRHSIIETSRSSLTEPTAEVYNQYPSNALVFESSPFNTGSAHVKHLPETRTKGTNV

SEQ ID NO: 134 - protein, 715 aa, Homo sapiens
MDWISFSTMASLSGSCWVRCLGLCDRGSQWSPGMSGMSKSVLRTHPGPQSLPRVPGVPCGGLLEPLSRAEVSPRLGLRRDLLGGMAPPGSSTVFLLALTIIASTWALTPTHYLTKHDVERLKASLDRPFTNLESAFYSIVGLSSLGAQVPDAKKACTYIRSNLDPSNVDSLFYAAQASQALSGCEISISNETKDLLLAAVSEDSSVTQIYHAVAALSGFGLPLASQEALSALTARLSKEETVLATVQALQTASHLSQQADLRSIVEEIEDLVARLDELGGVYLQFEEGLETTALFVAATYKLMDHVGTEPSIKEDQVIQLMNAIFSKKNFESLSEAFSVASAAAVLSHNRYHVPVVVVPEGSASDTHEQAILRLQVTNVLSQPLTQATVKLEHAKSVASRATVLQKTSFTPVGDVFELNFMNVKFSSGYYDFLVEVEGDNRYIANTVELRVKISTEVGITNVDLSTVDKDQSIAPKTTRVTYPAKAKGTFIADSHQNFALFFQLVDVNTGAELTPHQTFVRLHNQKTGQEVVFVAEPDNKNVYKFELDTSERKIEFDSASGTYTLYLIIGDATLKNPILWNVADVVIKFPEEEAPSTVLSQNLFTPKQEIQHLFREPEKRPPTVVSNTFTALILSPLLLLFALWIRIGANVSNFTFAPSTIIFHLGHAAMLGLMYVYWTQLNMFQTLKYLAILGSVTFLAGNRMLAQQAVKRTAH

SEQ ID NO: 135 - protein, 175 aa, Homo sapiens
MGKAAAAVAFGAEVGVRLALFAAFLVTELLPPFQRLIQPEEMWLYRNPYVEAEYFPTKPMFVIAFLSPLSLIFLAKFLKKADTRDSRQACLAASLALALNGVFTNTIKLIVGRPRPDFFYRCFPDGLAHSDLMCTGDKDVVNEGRKSFPSGHSSCMNIHMGSTLCFGFTSVSLAL

SEQ ID NO: 136 - protein, 365 aa, Homo sapiens
MAVMAPRTLLLLLSGALALTETWAGSHSMRYFYTSVSRPGRGEPRFIAVGYVDDTQFVRFDSDAASQRMEPRAPWIEQEGPEYWDQETRNVKAHSQTDRVDLGTLRGYYNQSEAGSHTIQRMYGCDVGSDGRFLRGYHQYAYDGKDYIALNEDLRSWTAADMAAQITKRKWEAAHVAEQLRAYLEGTCVEWLRRYLENGKETLQRTDPPKTHMTHHPISNYEATLRCWALGFYPLEITLTQERDGEDQIQDAEFVETRLAGYRTFQKWAAAVVSSGEKQRYTCHVQHEGLPEPLTLRWELSSQPTIPIVGIIAGLVLFGAVITGAVVAAVMWRRKSSDRKGGSYSQAASSDSAQGSDVSLTACKV

SEQ ID NO: 137 - protein, 144 aa, Homo sapiens [sequence omitted]

SEQ ID NO: 138 - protein, 292 aa, Homo sapiens
MERGPVVGAGLGAGARIQALLGCLLKVLLWVASALLYFGSEQAARLLGSPCLRRLYHAWLAAVVIFGPLLQFHVNPRTIFASHGNFFNIKFVNSAWGWTCTFLGGFVLLVVFLATRRVAVTARHLSRLVVGAAVWRGAGRAFLLIEDLTGSCFEPLPQGLLLHELPDRRSCLAAGHQWRGYTVSSHTFLLTFCCLLMAEEAAVFAKYLAHGLPAGAPLRLVFLLNVLLLGLWNFLLLCTVIYFHQYTHKVVGAAVGTFAWYLTYGSWYHQPWSPGSPGHGLFPRPHSSRKHN

SEQ ID NO: 139 - protein, 249 aa, Homo sapiens
MRWCLLLIWAQGLRQAPLASGMMTGTIETTGNISAEKGGSIILQCHLSSTTAQVTQVNWEQQDQLLAICNADLGWHISPSFKDRVAPGPGLGLTLQSLTVNDTGEYFCIYHTYPDGTYTGRIFLEVLESSGIPAGAMAEHGARFQIPLLGAMAATLVVICTAVIVVVALTRKKALRIHSVEGDLRRKSAGQEEWSPSAPSPPGSCVQAEAAPAGLCGEQRGEDCAELHDYFNVLSYRSLGNCSFFTETG

SEQ ID NO: 140 - protein, 246 aa, Homo sapiens
MARLGALLLAAALGALLSFALLAAAVASDYWYILEVADAGNGSAWPGRAELLSSHSGLWRICGQNGCIPLVDPFASESLDVSTSVQHLILLHRAVIVVLPLSLVLLVCGWICGLLSSLAQSVSLLLFTGCYFLLGSVLTLAGVSIYISYSHLAFAETVQQYGPQHMQGVRVSFGWSMALAWGSCALEAFSGTLLLSAAWTLSLSPPICGHLSPQQVGGRPWMLKVNTVHCPHNGEKEENGMRDPLY

SEQ ID NO: 141 - protein, 88 aa, Homo sapiens
MKALMLLTLSVLLCWVSGKMWVFSNLRCGTPEEPCQEAFNQTNRKLGLTYNTTCCNKDNCNSAGPRPTPALGLVFLTSLAGLGLWLLH

SEQ ID NO: 142 - protein, 275 aa, Homo sapiens
MAPPPPSPQLLLLAALARLLGPSEAEDVTFLYHPCAHPWLKLQLALLAYACMANPSLTPDFSLTQDRALALAFALRSWRPPGTEVTSQGPRQPSSSGAKRRRLRAALGPQPTRSALRFPSASPGSLKAKQSMAGIPGRESNAPSVPTVSLLPGAPGGNASSRTEAQVPNGQGSPGGCVCSSQASPAPRAAAPPRAARGPTPRTEEAAWAAMALTFLLVLLTLATLCTRLHRNFRRGESIYWGPRPLPRGPRAGRSLVAMARHWPSTAGAFLLVGC

SEQ ID NO: 143 - protein, 826 aa, Homo sapiens
MARARAGALLALWVLGAAAHPQCLDFRPPFRPTQPLRLCAQYSDFGCCDEGRDAELTRRFWALASRVDAAEWAACAGYARDLLCQSVEWTDMQRDNEVLAKLTGWSAPGDGAVTAVENSPSLDYPGLGTTFTSCECSPYAAHLYDAEDPFTPLRTVPGLCQDYCLDMWHKCRGLFRHLSTDQELWALEGNLARFCRYLSLDDTDYCFPYLLVNKNLNSNLGHVVADAKGCLQLCLEEVANGLRNPVAMVHARDGTHRFFVAEQVGLVWAYLPDRSRLGKPFLNISRVVLTSPWEGDERGFLGIAFHPSFQHNRRLYVYYSVGIRSSEWIRISEFRVSEDDENAVDHSSERIILEVKEPASNHNGGQLLFGDDGYLYIFTGDGGMAGDPFGTFGNAQNKYVQLLIGLWVGLHIPGLLILFQRSALLGKVLRIDVDRKGARPALRHPARQPVRGRPRGAAEVYALGVRNMWRCSFDRGDPSSGTGRGRLFCGDVGQNKFEEVDVVERGGNYGWRAREGFECYDRSLCANTSLNDLLPIFAYPHTVGKSVTGGYVYRGCEYPNLNGLYIFGDFMSGRLMSLQENPGTGQWQYSEICMGHGQTCEFPGLINNYYPYIISFGEDEAGELYFMSTGEPSATAPRGVVYKIIDASRVHPEDTEHPAAYSAGAHAGARRGRPTAAPPAPTPRPARPTQQPGSRRGGGRRRGRLNSASRAFRDGEVRLVRPAGLSSGSGRVEVFVGGRWGTVCDDSWNISGAAVVCRQLGFAYAVRAVKRAEFGQGGSLPILLDDVRCAGWERNLLECQHNGVGTHNCEHDEDAGVVCSHQNPDL

SEQ ID NO: 144 - protein, 422 aa, Homo sapiens
MAGCCAALAAFLFEYDTPRIVLIRSRKVGLMNRAVQLLILAYVIGWVFVWEKGYQETDSVVSSVTTKVKGVAVTNTSKLGFRIWDVADYVIPAQEENSLFVMTNVILTMNQTQGLCPEIPDATTVCKSDASCTAGSAGTHSNGVSTGRCVAFNGSVKTCEVAAWCPVEDDTHVPQPAFLKAAENFTLLVKNNIWYPKFNFSKRNILPNITTTYLKSCIYDAKTDPFCPIFRLGKIVENAGHSFQDMAVEGGIMGIQVNWDCNLDRAASLCLPRYSFRRLDTRDVEHNVSPGYNFRFAKYYRDLAGNEQRTLIKAYGIRFDIIVFGKAGKFDIIPTMINIGSGLALLGMATVLCDIIVLYCMKKRLYYREKKYKYVEDYEQVGPSWPPAGTGLSSLGCGSPGRGPVWGGPSAEAGTSVAWCPR

SEQ ID NO: 145 - protein, 280 aa, Homo sapiens
MQLQVFWTGLEYTCRLLGITTAAVLIGVGTETFLQGQFKSLAFYLLMAQSGTRHVLETARGECCLGESRFTGAAVSICEGAYFVAQLLAICFQCQPGSLADRVREKAHWLGCFQKFLAYLLLSVACFLHPVLVWHVTIPGSMLIITGLAYFLLSKRKKRKAAPEVLASPEQYTDPSSSAVSTTGSGDTEQTYTFHGALKEGPSSLFIHMKSILKGTKKPSALQPPNTLMELSLEPADSLAKKKQVHFEDNLVRIVPSLAEGLDDGDTPLFLSSLTATGLF

SEQ ID NO: 146 - protein, 627 aa, Homo sapiens
MAGGSATTWGYPVALLLLVATLGLGLRHSYDCGIKGMQLLVFPRPGQTLRFKVVDEFGNRFDVNNCSICYHWVTSRPQEPAVFSADYRGCHVLEKDGRFHLRVFMEAVLPNGRVDVAQDATLICPKPDPSRTLDSQLAPPAMFSVSTPQTLSFLPTSGHTSQGSGHAFPSPLDPGHSSVHPTPALPSPGPGPTLATLAQPHWGTLEHWDVNKRDYIGTHLSQEQCQVASGHLPCIVRRTSKEACQQAGCCYDNTREVPCYYGNTATVQCFRDGYFVLVVSQEMALTHRITLANIHLAYAPTSCSPTQHTEAFVVFYFPLTHCGTTMQVAGDQLIYENWLVSGIHIQKGPQGSITRDSTFQLHVRCVFNASDFLPIQASIFPPPSPAPMTQPGPLRLELRIAKDETFSSYYGEDDYPIVRLLREPVHVEVRLLQRTDPNLVLLLHQCWGAPSANPFQQPQWPILSDGCPFKGDSYRTQMVALDGATPFQSHYQRFTVATFALLDSGSQRALRGLVYLFCSTSACHTSGLETCSTACSTGTTRQRRSSGHRNDTARPQDIVSSPGPVGFEDSYGQEPTLGPTDSNGNSSLRPLLWAVLLLPAVALVLGFGVFVGLSQTWAQKLWESNRQ

SEQ ID NO: 147 - protein, 438 aa, Homo sapiens
MTAAAASNWGLITNIVNSIVGVSVLTMPFCFKQCGIVLGALLLVFCSWMTHQSCMFLVKSASLSKRRTYAGLAFHAYGKAGKMLVETSMIGLMLGTCIAFYVVIGDLGSNFFARLFGFQVGGTFRMFLLFAVSLCIVLPLSLQRNMMASIQSFSAMALLFYTVFMFVIVLSSLKHGLFSGQWLRRVSYVRWEGVFRCIPIFGMSFACQSQVLPTYDSLDEPSVKTMSSIFASSLNVVTTFYVMVGFFGYVSFTEATAGNVLMHFPSNLVTEMLRVGFMMSVAVGFPMMILPCRQALSTLLCEQQQKDGTFAAGGYMPPLRFKALTLSVVFGTMVGGILIPNVETILGLTGATMGSLICFICPGADLQENPQERTFLPGGAVGRPGRPGGEHCHHTVCERGGPRGLGRGSPWRPAWRGRGFDEGGGSAALSPGSGCGRG

SEQ ID NO: 148 - protein, 424 aa, Homo sapiens
MKSPFYRCQNTTSVEKGNSAVMGGVLFSTGLLGNLLALGLLARSGLGWCSRRPLRPLPSVFYMLVCGLTVTDLLGKCLLSPVVLAAYAQNRSLRVLAPALDNSLCQAFAFFMSFFGLSSTLQLLAMALECWLSLGHPFFYRRHITLRLGALVAPVVSAFSLAFCALPFMGFGKFVQYCPGTWCFIQMVHEEGSLSVLGYSVLYSSLMALLVLATVLCNLGAMRNLYAMHRRLQRHPRSCTRDCAEPRADGREASPQPLEELDHLLLLALMTVLFTMCSLPVIVSPRAPRQQGTETVRPRMRGGKGGADRDGRGARRAAPWARKYRAYYGAFKDVKEKNRTSEEAEDLRALRFLSVISIVDPWIFIIFRSPVFRIFFHKIFIRPLSYLLQPYSAVRGHGKILGSKILLQITPSKLEQHIAEKEHN

SEQ ID NO: 149 - protein, 568 aa, Homo sapiens
MASALIYVSKFKSFVILVGTPLLLLPLVILMPAKFVRCAYVIILMAIYWCTEVIPLAVTSLMPVLLFPLFQILDSRQVCVQYMKDTNMLFLGGLIVAVAVERWNLHKRIALRTLLWVGAKPARLMLGFMGVTALLSMWISNTATTAMMVPIVEAILQQMEATSAATEAGLELVDKGKAKELPGSQVIFEGPTLGQQEDQERKRLCKAMTLCICYAASIGGTATLTGTGPNVVLLGQMNELFPDSKDLVNFASWFAFAFPNMLVMLLFAWLWLQFVYMRFNFKKSWGCGLESKKNEKAALKVLQEEYRKLGPLSFAEINVLICFFLLVILWFSRDPGFMPGWLTVAWVEGETKYVSDATVAIFVATLLFIVPSQKPKFNFRSQTEEERKTPFYPPPLLDWKVTQEKVPWGIVLLLGGGFALAKGSEASGLSVWMGKQMEPLHAVPPAAITLILSLLVAVFTECTSNVATTTLFLPIFASMSRSIGLNPLYIMLPCTLSASFAFMLPVATPPNAIVFTYGHLKVADMVKTGVIMNIIGVFCVFLAVNTWGRAIFDLDHFPDWANVTHIET

SEQ ID NO: 150 - protein, 369 aa, Homo sapiens
MIRNWLTIFILFPLKLVEKCDSQPQEGDQCQESSVSLTVPPVVKLENGSSTNVSLTLRPPLNATLVITFEITFRSKNITILELPDEFQKGFSGHLTNMQATLQGISVKNKKNPRIRFLVIRSSAISIINQVIGWIYFVAWSISFYPQVIMNWRRKSVIGLSFDFVALNLTGFVAYSVFNIGLLWVPYIKEQFLLKYPNGVNPVNSNDVFFSLHAVVLTLIIIVQCCLYERGGQRVSWPAIGFLVLAWLFAFVTMIVAAVGVITWLQFLFCFSYIKLAVTLVKYFPQAYMNFYYKSTEGWSIGNVLLDFTGGSFSLLQMFLQSYNNDQWTLIFGDPTKFGLGVFSIVFDVVFFIQHFCLYRKRPGYDQLN

SEQ ID NO: 151 - protein, 133 aa, Homo sapiens
MASEVVCGLIFRLLLPICLAVACAFRYNGLSFVYLIYLLLIPLFSEPTKTTMQGHTGRLLKSLCFISLSFLLLHIIFHITLVSLEAQHRIAPGYNCKKSQYLDTSGGTSTSTMKKGVVKGGDGEGRPSLPNQY

SEQ ID NO: 152 - protein, 255 aa, Homo sapiens
MRRISLTSSPVRLLLFLLLLLIALEIMVGGHSLCFNFTIKSLSRPGQPWCEAQVFLNKNLFLQYNSDNNMVKPMGLLGKKVNATSTWGELTQTLGEVGRDLRMLLCDIKPQIKTSDPSTLQVEMFCQREAERCTGASWQFATNGEKSLLFDAMNMTWTVINHEASKIKETWKKDRGLEKYFRKLSKGDCDHWLREFLGHWEAMPEPTVSPVNASDIHWSSSSLPDRWIILGAFILLLLMGIVLICVWWQNGRRST

SEQ ID NO: 153 - protein, 350 aa, Homo sapiens
MAPTQGPRAPLEFGGPLGAAALLLLLPATMFHLLLAARSGPARLLGPPASLPGLEVLWSPRALLLWLAWLGLQAALYLLPARKVAEGQELKDKSRLRYPINGFQALVLTALLVGLGMSAGLPLGALPEMLLPLAFVATLTAFIFSLFLYMKAQVAPVSALAPGGNSGNPIYDFFLGRELNPRICFFDFKYFCELRPGLIGWVLINLALLMKEAELRGSPSLAMWLVNGFQLLYVGDALWHEEAVLTTMDITHDGFGFMLAFGDMAWVPFTYSLQAQFLLHHPQPLGLPMASVICLINGVSHLLPYFYLLYFTALLVHREARDERQCLQKYGLAWQEYCRRVPYRIMPYIY

SEQ ID NO: 154 - protein, 983 aa, Homo sapiens
MRLGSGTFATCCVAIEVLGIAVFLRGFFPAPVRSSARAEHGAEPPAPEPSAGASSNWTTLPPPLFSKVVIVLIDALRDDFVFGSKGVKFMPYTTYLVEKGASHSFVAEAKPPTVTMPRIKALMTGSLPGFVDVIRNLNSPALLEDSVIRQAKAAGKRIVFYGDETWVKLFPKHFVEYDGTTSFFVSDYTEVDNNVTRHLDKVLKRGDWDILILHYLGLDHIGHISGPNSPLIGQKLSEMDSVLMKIHTSLQSKERETPLPNLLVLCGDHGMSETGSHGASSTEEGNTPLILISSAFERKPGDIRHPKHVQQTDVAATLAIALGLPIPKDSVGSLLFPVVEGRPMREQLRFLHLNTVQLIKLLQENVPSYEKDPGFEQFKMSERLHGNWIRLYLEEKHSEVLFNLGSKVLRQYLDALKTLSLSLSAQVAQYDIYSMMVGTVVVLEVLTLLLLSVPQALRRKAELEVPLSSPGFSLLFYLVILVLSAVHVIVCTSAESSCYFCGLSWLAAGGVMVLASALLCVIVSVLTNVLVGGNTPRKNPMHPSSRWSELDLLILLGTAGHVLSLGASSFVEEEHQTWYFLVNTLCLALSQETYRNYFLGDDGEPPCGLCVEQGHDGATAAWQDGPGCDVLERDKGHGSPSTSEVLRGREKWMVLASPWLILACCRLLRSLNQTGVQWAHRPDLGHWLTSSDHKAELSVLAALSLLVVFVLVQRGCSPVSKAALALGLLGVYCYRAAIGSVRFPWRPDSKDISKGIIEARFVYVFVLGILFTGTKDLLKSQVIAADFKLKTVGLWEIYSGLVLLAALLFRPHNLPVLAFSLLIQTLMTKFIWKPLRHDAAEITVMHYWFGQAFFYFQGNSNNIATVDISAGFVGLDTYVEIPAVLLTAFGTYAGPVLWASHLVHFLSSETRSGSALSHACFCYALICSIPVFTYIVLVTSLRYHLFIWSVFSPKLLYEGMHLLITAAVCVFFTAMDQTRLTQS

SEQ ID NO: 155 - protein, 376 aa, Homo sapiens
MNVAIFRTGPMLLWTAVLLFVPCVGKTVWLYLQAWPNPVFEGDALTLRCQGWKNTPLSQVKFYRDGKFLHFSKENQTLSMGAATVQSRGQYSCSGQVMYIPQTFTQTSETAMVQVQELFPPPVLSAIPSPEPREGSLVTLRCQTKLHPLRSALRLLFSFHKDGHTLQDRGPHPELCIPGAKEGDSGLYWCEVAPEGGQVQKQSPQLEVRVQAPVSRPVLTLHHGPADPAVGDMVQLLCEAQRGSPPILYSFYLDEKIVGNHSAPCGGTTSLLFPVKSEQDAGNYSCEAENSVSRERSEPKKLSLKGSQVLFTPASNWLVPWLPASLLGLMVNAAALLVYVRSWRKAGPLPSQIPPTAPGGEQCPLYAKEPASCWRE

SEQ ID NO: 156 - protein, 292 aa, Homo sapiens
MGIPSLPKSLFLPIFFVFLLLYVLILMGNTFILVAVVAKPSLHKPMYFFLINLSTLDILVTTTTVPKMLSLFLFGDSFLSFPACFLQMYLFHSFSCSEAFILVVMAYDRYVAICRPLHYPVLMTPQTNTVLTTSAWLTALLLPIPAVVQTSQMAFDIIVHIYHCFCDHLAVTFMGFCIAMVVSFLPLLLVLLSYAHILTSVLCINCQEGRSKAFSTCSSHLLVVGTYYSSIAIAYVAYRADLPLDFHVMGNVVYAILTPVLNPVIYKLRNKDVKAAITKIACPQEPKNARKP

SEQ ID NO: 157 - protein, 113 aa, Homo sapiens
MDKPLFPLVPLHWFGFGYTALVVSGGIVGYVKTGSVPSLAAGLLFGSLAGLGAYQLSQDPRNVWVFLATSGTLAGIMGMRFYHSGKFMPAGLIAGASLLMVAKVGVSMFNRPH

SEQ ID NO: 158 - protein, 592 aa, Homo sapiens
MVDGVMILPVLIMIALPSPSMEDEKPKVNPKLYMCVCEGLSCGNEDHCEGQQCFSSLSINDGFHVYQKGCFQVYEQGKMTCKTPPSPGQAVECCQGDWCNRNITAQLPTKGKSFPGTQNFHLEVGLIILSVVFAVCLLACLLGVALRKFKRRNQERLNPRDVEYGTIEGLITTNVGDSTLAGSKFLPLDAQLLVILPINSTSQWCSEEVKEDEIHTNQCIALRSFTCTLTGHVSRIAALHVYGYCHCLLLLASPPRQIVNGENKDGKAPNVLINFNQSCPLVLTSILFDYEQDYLDSGKGRYGEVWRGSWQGENVAVKIFSSRDEKSWFRETELYNTVMLRHENILGFIASDMTSRHSSTQLWLITHYHEMGSLYDYLQLTTLDTVSCLRIVLSIASGLAHLHIEIFGTQGKPAIAHRDLKSKNILVKKNGQCCIADLGLAVMHSQSTNQLDVGNNPRVGTKRYMAPEVLDETIQVDCFDSYKRVDIWAFGLVLWEVARRMVSNGIVEDYKPPFYDVVPNDPSFEDMRKVVCVDQQRPNIPNRWFSDPTLTSLAKLMKECWYQNPSARLTALRIKKTLTKIDNSLDKLKTDC

SEQ ID NO: 159 - protein, 292 aa, Homo sapiens
MRTPVVMTLGMVLAPCGLLLNLTGTLAPGWRLVKGFLNQPVDVELYQGLWDMCREQSSRERECGQTDQWGYFEAQPVLVARALMVTSLAATVLGLLLASLGVRCWQDEPNFVLAGLSGVVLFVAGLLGLIPVSWYNHFLGDRDVLPAPASPVTVQVSYSLVLGYLGSCLLLLGGFSLALSFAPWCDERCRRRRKGPSAGPRRSSVSTIQVEWPEPDLAPAIKYYSDGQHRPPPAQHRKPKPKPKVGFPMPRPRPKAYTNSVDVLDGEGWESQDAPSCSTHPCDSSLPCDSDL

SEQ ID NO: 160 - protein, 383 aa, Homo sapiens
MGLGPVFLLLAGIFPFAPPGAAAEPHSLRYNLTVLSWDGSVQSGFLAEVHLDGQPFLRYDRQKCRAKPQGQWAEDVLGNKTWDRETRDLTGNGKDLRMTLAHIKDQKEGLHSLQEIRVCEIHEDNSTRSSQHFYYDGELFLSQNVETEEWTVPQSSRAQTLAMNVRNFLKEDAMKTKTHYHAMHADCLQELRRYLESSVVLRRRVPPMVNVTRSEASEGNITVTCRASSFYPRNITLTWRQDGVSLSHDTQQWGDVLPDGNGTYQTWVATRIRQGEEQRFTCYMEHSGNHGTHPVPSGKALVLQSQRTDFPYVSAAMPCFVIIIILCVPCCKKKTSAAEGPELVSLQVLDQHPVGTGDHRDAAQLGFQPLMSATGSTGSTEGA

SEQ ID NO: 161 - protein, 232 aa, Homo sapiens
MPGAAAAAAAAAAAMLPAQEAAKLYHTNYVRNSRAIGVLWAIFTICFAIVNVVCFIQPYWIGDGVDTPQAGYFGLFHYCIGNGFSRELTCRGSFTDFSTLPSGAFKAASFFIGLSMMLIIACIICFTLFFFCNTATVYKICAWMQLTSAACLVLGCMIFPDGWDSDEVKRMCGEKTDKYTLGACSVRWAYILAIIGILDALILSFLAFVLGNRQDSLMAEELKAENKDDGNA

SEQ ID NO: 162 - protein, 575 aa, Homo sapiens
MSVEPPPELEEKAASEPEAGAMPEKRAGAQAAGSTWLQGFGPPSVYHAAIVIFLEFFAWGLLTTPMLTVLHETFSQHTFLMNGLIQGVKPLWPSDPPGLATNNKYSLSHRCSFWGLVYSVQKDTLRKKKGLLSFLSAPLIGALSDVWGRKPFLLGTVFFTCFPIPLMRISPWWYFAMISVSGVFSVTFSVIFAYVADVTQEHERSTAYGWVSATFAASLVSSPAIGAYLSASYGDSLVVLVATVVALLDICFILVAVPESLPEKMRPVSWGAQISWKQADPFAIKIMKLMFQNIGNINVYWHFKCVLSAYSQSLKKVGKDSTVLLICITVFLSYLPEAGQYSSFFLYLRQVIGFGSVKIAAFIAMVGILSIVAQTAFLSILMRSLGNKNTVLLGLGFQMLQLAWYGFGSQAWMMWAAGTVAAMSSITFPAISALVSRNAESDQQGVAQGIITGIRGLCNGLGPALYGFIFYMFHVELTELGPKLNSNNVPLQGAVIPGPPFLFGACIVLMSFLVALFIPEYSKASGVQKHSNSSSGSLTNTPERGSDEDIEPLLQDSSIWELSSFEEPGNQCTEL

SEQ ID NO: 163 - protein, 663 aa, Homo sapiens
MKRTSCPSRPRTALVLTLNVRHPDNPYSQANQASWSSNWRLSKEPSAPPPDPQAAAGRRAHEGAGTAAASAASPSSRSAPSWRGHGRGMSVEPPPELEEKAASEPEAGAMPEKRAGAQAAGSTWLQGFGPPSVYHAAIVIFLEFFAWGLLTTPMLTVLHETFSQHTFLMNGLIQGVKPLWPSDPPGLATNNKYSLSHRCSFWGLVYSVQKDTLRKKKGLLSFLSAPLIGALSDVWGRKPFLLGTVFFTCFPIPLMRISPWWYFAMISVSGVFSVTFSVIFAYVADVTQEHERSTAYGWVSATFAASLVSSPAIGAYLSASYGDSLVVLVATVVALLDICFILVAVPESLPEKMRPVSWGAQISWKQADPFAIKIMKLMFQNIGNINVYWHFKCVLSAYSQSLKKVGKDSTVLLICITVFLSYLPEAGQYSSFFLYLRQVIGFGSVKIAAFIAMVGILSIVAQTAFLSILMRSLGNKNTVLLGLGFQMLQLAWYGFGSQAWMMWAAGTVAAMSSITFPAISALVSRNAESDQQGVAQGIITGIRGLCNGLGPALYGFIFYMFHVELTELGPKLNSNNVPLQGAVIPGPPFLFGACIVLMSFLVALFIPEYSKASGVQKHSNSSSGSLTNTPERGSDEDIEPLLQDSSIWELSSFEEPGNQCTEL

SEQ ID NO: 164 - protein, 739 aa, Homo sapiens
MDDKEPKRWPTLRDRLCSDGFLFPQYPIKPYHLKGIHRAVFYRDLEELKFVLLTRYDINKRDRKERTALHLACATGQPEMVHLLVSRRCELNLCDREDRTPLIKAVQLRQEACATLLLQNGADPNITDVFGRTALHYAVYNEDTSMIEKLLSHGTNIEECSKNEYQPLLLAVSRRKVKMVEFLLKKKANVNAIDYLGRSALILAVTLGEKDIVILLLQHNIDVFSRDVYGKLAEDYAKRRSSASRDLGSVNHDDIVGWMLVSPQKQRAEKATSDDKDSVSNIATEIKEGPISGTDHLSEEKNFKESCLFDRDLREQLTTIDKETLQGAAKPDAHFRTMPCGQLLHFLQRNTIIAAVSGVAILMAIVLLLLGLASYIRKKQPSLQYWRAAPGGRKGIPLLHSDAQSLDMRDDGGGSSNGAFAFRPLLTFTTAYKTAVACVLLTVQPDWTCSAPGEMDRKPIPARSEDWEAFLEENTLNWRPERGLGNRQPPFLSSHPGNRLVSDKPACRSSADTRPSGQAWPTVGLRAAAGAFREIQTGFVSPDSSPRTGSPLALGPETPQVACLPGHPPVRPQGSREDKESDCIHTARHIQVLQKGLTKTLIILTSSGWPRALDSTVPVCSPGLQHPDHPVLTTPCPTPRCQVPPVLRGIPTHPSGLQTFVGTWYIEHLLCAMLGLGCECGAGAPWLLCCDLCAVIQGLCVWNHTIRSPWNLVSFIQPEAFAMRLRNCVSPYAVPLTAE

SEQ ID NO: 165 - protein, 406 aa, Homo sapiens
MEAVGIWRKELLQPQTEGKALREGTDPVRMHFPSVRGPPFLPVSGKRRLVKVSRPRCLKLRTRQKCSSYFKNFRYCSYAPHVRICMPLTDGISSFEDLLANNILRIFVWVIAFITCFGNLFVIGMRSFIKAENTTHAMSIKILCCADCLMGVYLFFVGIFDIKYRGQYQKYALLWMESVQCRLMGFLAMLSTEVSVLLLTYLTLEKFLVIVFPFSNIRPGKRQTSVILICIWMAGFLIAVIPFWNKDYFGNFYGKNGVCFPLYYDQTEDIGSKGYSLGIFLGVNLLAFLIIVFSYITMFCSIQKTALQTTEVRNCFGREVAVANRFFFIVFSDAICWIPVFVVKILSLFRVEIPGQSLLSFPSIIHRAFLRPSFDKARVFQRNINLNYHPCMKIPLQELRNPGERL

SEQ ID NO: 166 - protein, 512 aa, Homo sapiens
MAGGMSAECPEPGPGGLQGQSPGPGRQCPPPITPTSWSLPPWRAYVAAAVLCYINLLNYMNWFIIAGVLLDIQEVFQISDNHAGLLQTVFVSCLLLSAPVFGYLGDRHSRKATMSFGILLWSGAGLSSSFISPRYSWLFFLSRGIVGTGSASYSTIAPTVLGDLFVRDQRTRVLAVFYIFIPVGSGLGYVLGSAVTMLTGNWRWALRVMPCLEAVALILLILLVPDPPRGAAETQGEGAVGGFRSSWCEDVRYLGKNWSFVWSTLGVTAMAFVTGALGFWAPKFLLEARVVHGLQPPCFQEPCSNPDSLIFGALTIMTGVIGVILGAEAARRYKKVIPGAEPLICASSLLATAPCLYLALVLAPTTLLASYVFLGLGELLLSCNWAVVADILLSVVVPRCRGTAEALQITVGHILGDAGSPYLTGLISSVLRARRPDSYLQRFRSLQQSFLCCAFVIALGGGCFLLTALYLERDETRAWQPVTGTPDSNDVDSNDLERQGLLSGAGASTEEP

SEQ ID NO: 167 - protein, 1149 aa, Homo sapiens
MTSLAQQLQRLALPQSDASLLSRDEVASLLFDPKEAATIDRDTAFAIGCTGLEELLGIDPSFEQFEAPLFSQLAKTLERSVQTKAQSGVPLAKGTLITHCYKDLGFMDFICSLVTKSVKVFAEYPGSSAQLRVLLAFYASTIVSALVAAEDVSDNIIAKLFPYIQKIIKTLTKIPSLIKDGLSCLIVLLQRQKPESLGKKYEVLKIAADILIKEEILSENDQLSNQVVVCLLPFMVINNDDTESAEMKIAIYLSKSGICSLHPLLRGWEEGDIWWNPEQLKEDSRDYLHLLIGLFEMMLNGADAVHFRVLMKLFIKMVLSQLLPMAEQLLEKIQKEPTAVLKDEAMVLHLTLGKYNEFSVSLLNEDPKSLDIFIKAVHTTKELYAGMPTIQITALEKLIRIYISDPALGNNRCLLNICQKLSPDGGKIPKDILDEEKFNVELIVQCIRLSEMPQTHHHALLLLGTVAGIFPDKVLHNIMSIFTFMGANVMRLDDTYSFQVINKTVKMVIPALIQSDSGDSIEVSRNVEEIVVKIISVFVDALPHVPEHRRLPILVQLVDTLGAEKFLWILLILLFEQYVTKTVLAAAYGEKDAILEADTEFWFSVCCEFSVQHQIQSLMNILQYLLKLPEEKEAKEKQKRMQVILSTSSEGFLKLLETVLGYISAVAQSMERNADKLTVKFWRALLSKAYDLLDKVTRFLKLVPDLLAIVQRKKKEGEEEQAINRQTALYTLKLLCKNFGAENPDPFVPVLNTAVKLIAPERKEEKNVLGSALLCIAEVTSTLEALAIPQLPSLMPSLLTTMKNTSELVSSEVYLLSALAALQKVVETLPHFISPYLEGILSQNHMGPFMSILQEHIGVMKKEELTSHQSQLTAFFLEALDFRAQHSENDLEEVGKTENCIIDCLVAMVVKLSEVTFRPLFFKLFDWAKTEDAPKDRLLTFYNLADCIAEKLKGLFTLFAGHLVKPFADTLNQVNISKTDEAFFDSENDPEKCCLLLQFILNCLYKIFLFDTQHFISKERAEALMMPLVDQLENRLGGEEKFQERVTKHLIPCIAQFSVAMADDSLWKPLNYQILLKTRDSSPKVRFAALITVLALAEKLKENYIVLLPESIPFLAELMEDECEEVEHQCQKTIQQLETVLGEPLQSYF

SEQ ID NO: 168 - protein, 499 aa, Homo sapiens
MERAEEPVVYQKLLPWEPSLESEEEVEEEETSEALVLNPRRHQDSSRNKAGGLPGTWARVVAALLLLAVGCSLAVRQLQNQGRSTGSLGSVAPPPGGHSHGPGVYHHGAIISPAPTCSHLGRELLVAGGNVVDAGVGAALCLAVVHPHATGLGAMFWGLFHDSSSGNSTALTSGPAQTLAPGLGLPAALPTLHLLHARFGRLPWPRLLVGPTTLAQEGFLVDTPLARALVARGTEGLCPLLCHADGTPLGAGARATNPQLAAVLRSAALAPTSDLAGDALLSLLAGDLGVEVPSAVPRPTLEPAEQLPVPQGILFTTPSPSAGPELLALLEAALRSGAPIPDPCPPFLQTAVSPESSALAAVDSSGSVLLLTSSLNCSFGSAHLSPSTGVLLSNLVAKSTTSAWACPLILRGSLDDTEADVLGLVASGTPDVARAMTHTLLRHLAARPPTQAQHQHQGQQEPTEHPSTCGQGTLLQVAAHTEHAHVSSVPHACCPFQGF

SEQ ID NO: 169 - protein, 1552 aa, Homo sapiens
MGSLQQALVCFEKRLVVAHELGEAFNKAQAYGELGSLHSQLGNYEQAISCLERQLNIARDMKDRALESDAACGLGGVYQQMGEYDTALQYHQLDLQIAEETNNPTCQGRAYGNLGLTYESLGTFERAVVYQEQHLSIAAQMNDLAAKTVSYSSLGRTHHALQNYSQAVMYLQEGLRLAEQLGRREDEAKIRHGLGLSLWASGNLEEAQHQLYRASALFETIRHEAQLSTDYKLSLFDLQTSSYQALQRVLVSLGHHDEALAVAERGRTRAFADLLVERQTGQQDSDPYSPVTIDQILEMVNGQRGLVLYYSLAAGYLYSWLLAPGAGIVKFHEHYLGENTVENSSDFQASSSVTLPTATGSALEQHIASVREALGVESHYSRACASSETESEAGDIMDQQFEEMNNKLNSVTDPTGFLRMVRRNNLFNRSCQSMTSLFSNTVSPTQDGTSSLPRRQSSFAKPPLRALYDLLIAPMEGGLMHSSGPVGRHRQLILVLEGELYLIPFALLKGSSSNEYLYERFGLLAVPSIRSLSVQSKSHLRKNPPTYSSSTSMAAVIGNPKLPSAVMDRWLWGPMPSAEEEAYMVSELLGCQPLVGSVATKERVMSALTQAECVHFATHISWKLSALVLTPSMDGNPASSKSSFGHPYTIPESLRVQDDASDGESISDCPPLQELLLTAADVLDLQLPVKLVVLGSSQESNSKVAADGVIALTRAFLAAGAQCVLVSLWPVPVAAFKMFIHAFYSSLLNGLKASAALGEAMKVVQSSKAFSHPSNWAGFMLIGSDVKLNSPSSLIGQALTEILQHPERARDALRVLLHLVEKSLQRIQNGQRNAMYTSQQSVENKVGGIPGWQALLTAVGFRLDPPTSGLPAAVFFPTSDPGDRLQQCSSTLQSLLGLPNPALQALCKLITASETGEQLISRAVKNMVGMLHQVLVQLQAGEKEQDLASAPIQVSISVQLWRLPGCHEFLAALGFDLCEVGQEEVILKTGKQANRRTVHFALQSLLSLFDSTELPKRLSLDSSSSLESLASAQSVSNALPLGYQQPPFSPTGADSIASDAISVYSLSSIASSMSFVSKPEGGSEGGGPGGRQDHDRSKNAYLQRSTLPRSQLPPQTRPAGNKDEEEYEGFSIISNEPLATYQENRNTCFSPDHKQPQPGTAGGMRVSVSSKGSISTPNSPVKMTLIPSPNSPFQKVGKLASSDTGESDQSSTETDSTVKSQEESNPKLDPQELAQKILEETQSHLIAVERLQRSGGQVSKSNNPEDGVQAPSSTAVFRASETSAFSRPVLSHQKSQPSPVTVKPKPPARSSSLPKVSSGYSSPTTSEMSIKDSPSQHSGRPSPGCDSQTSQLDQPLFKLKYPSSPYSAHISKSPRNMSPSSGHQSPAGSAPSPALSYSSAGSARSSPADAPDIDKLKMAAIDEKVQAVHNLKMFWQSTPQHSTGPMKIFRGAPGTMTSKRDVLSLLNLSPRHNKKEEGVDKLELKELSLQQHDGAPPKAPPNGHWRTETTSLGSLPLPAGPPATAPARPLRLPSGNGYKFLSPGRFFPSSKC

SEQ ID NO: 170 - protein, 485 aa, Homo sapiens
MVGEEKMSLRNRLSKSRENPEEDEDQRIPAKESLETPSNGRIDIKQLIAKKIKLTAEAEAINSSSPINVESESRSRFPVKEVEITTRKKIMKSFQELKPFFMKEVGSHFDDFVTNLIEKSASLDNGGCALTTFSVLEGEKNNHRAKDLRAPPEQGKIFIARRSLLDTLVVDYIDEGRLVLEFSLLSYAFGKFPTVVWTWWIMFLSTFSVPYFLFQHWATGYSKSSHPLIRSLFHGFLFMIFQIGVLGFGPTYVVLAYTLPPASRFIIIFEQIRFVMKAHSFVRENVPRVLNSAKEKSSTVPIPTVNQYLYFLFAPTLIYRDSYPRNPTVRWGYVAMKFAQDWWNSTSYSNYYRTWNVVVHDWLYYYAYKDFLWFFSKRFKSAAMLAVFAVSAVVHEYALAVCLSFFYPVLFVLFMFFGMAFNFIVNDSRKKPIWNVLMWTSLFLGNGVLLCFYSQEWYARQHCPLKNPTFLDYVRPRSWTCRYVF

SEQ ID NO: 171 - protein, 1335 aa, Homo sapiens
MESEMLQSPLLGLGEEDEADLTDWNLPLAFMKKRHCEKIEGSKSLAQSWRMKDRMKTVSVALVLCLNVGVDPPDVVKTTPCARLECWIDPLSMGPQKALETIGANLQKQYENWQPRARYKQSLDPTVDEVKKLCTSLRRNAKEERVLFHYNGHGVPRPTVNGEVWVFNKNYTQYIPLSIYDLQTWMGSPSIFVYDCSNAGLIVKSFKQFALQREQELEVAAINPNHPLAQMPLPPSMKNCIQLAACEATELLPMIPDLPADLFTSCLTTPIKIALRWFCMQKCVSLVPGVTLDLIEKIPGRLNDRRTPLGELNWIFTAITDTIAWNVLPRDLFQKLFRQDLLVASLFRNFLLAERIMRSYNCTPVSSPRLPPTYMHAMWQAWDLAVDICLSQLPTIIEEGTAFRHSPFFAEQLTAFQVWLTMGVENRNPPEQLPIVLQVLLSQVHRLRALDLLGRFLDLGPWAVSLALSVGIFPYVLKLLQSSARELRPLLVFIWAKILAVDSSCQADLVKDNGHKYFLSVLADPYMPAEHRTMTAFILAVIVNSYHTGQEACLQGNLIAICLEQLNDPHPLLRQWVAICLGRIWQNFDSARWCGVRDSAHEKLYSLLSDPIPEVRCAAVFALGTFVGNSAERTDHSTTIDHNVAMMLAQLVSDGSPMVRKELVVALSHLVVQYESNFCTVALQFIEEEKNYALPSPATTEGGSLTPVRDSPCTPRLRSVSSYGNIRAVATARSLNKSLQNLSLTEESGGAVAFSPGNLSTSSSASSTLGSPENEEHILSFETIDKMRRASSYSSLNSLIGVSFNSVYTQIWRVLLHLAADPYPEVSDVAMKVLNSIAYKATVNARPQRVLDTSSLTQSAPASPTNKGVHIHQAGGSPPASSTSSSSLTNDVAKQPVSRDLPSGRPGTTGPAGAQYTPHSHQFPRTRKMFDKGPEQTADDADDAAGHKSFISATVQTGFCDWSARYFAQPVMKIPEEHDLESQIRKEREWRFLRNSRVRRQAQQVIQKGITRLDDQIFLNRNPGVPSVVKFHPFTPCIAVADKDSICFWDWEKGEKLDYFHNGNPRYTRVTAMEYLNGQDCSLLLTATDDGAIRVWKNFADLEKNPEMVTAWQGLSDMLPTTRGAGMVVDWEQETGLLMSSGDVRIVRIWDTDREMKVQDIPTGADSCVTSLSCDSHRSLIVAGLGDGSIRVYDRRMALSECRVMTYREHTAWVVKASLQKRPDGHIVSVSVNGDVRIFDPRMPESVNVLQIVKGLTALDIHPQADLIACGSVNQFTAIYNSSGELINNIKYYDGFMGQRVGAISCLAFHPHWPHLAVGSNDYYISVYSVEKRVR

SEQ ID NO: 172 - protein, 575 aa, Homo sapiens
MIYLQIPYLNAGQNLDSMLHGTGMKSDSDQKKSENGVTLAPEDTLPFLKCYCSGHCPDDAINNTCITNGHCFAIIEEDDQGETTLASGCMKYEGSDFQCKDSPKAQLRRTIECCRTNLCNQYLQPTLPPVVIGPFFDGSIRWLVLLISMAVCIIAMIIFSSCFCYKGHLLLRVIHIRGQLESEGGVPVVLRHYCKSISSRRRYNRDLEQDEAFIPVGESLKDLIDQSQSSGSGSGLPLLVQRTIAKQIQMVRQVGKGRYGEVWMGKWRGEKVAVKVFFTTEEASWFRETEIYQTVLMRHENILGFIAADIKGTGSWTQLYLITDYHENGSLYDFLKCATLDTRALLKLAYSAACGLCHLHTEIYGTQGKPAIAHRDLKSKNILIKKNGSCCIADLGLAVKFNSDTNEVDVPLNTRVGTKRYMAPEVLDESLNKNHFQPYIMADIYSFGLIIWEMARRCITGGIVEEYQLPYYNMVPSDPSYEDMREVVCVKRLRPIVSNRWNSDEVSGTQSPEEVIRKCHQIYSLLTEHLFTFQCLRAVLKLMSECWAHNPASRLTALRIKKTLAKMVESQDVKI

SEQ ID NO: 173 - protein, 637 aa, Homo sapiens
MIYLQIPYLNAGQNLDSMLHGTGMKSDSDQKKSENGVTLAPEDTLPFLKCYCSGHCPDDAINNTCITNGHCFAIIEEDDQGETTLASGCMKYEGSDFQCKDSPKAQLRRTIECCRTNLCNQYLQPTLPPVVIGPFFDGSIRWLVLLISMAVCIIAMIIFSSCFCYKGHLLLRVIHIRGQLESEGGVPVVLRILCPQGERKVSSSPLPQHQRILAWSEHREHFLYIPKRQRDFAASPPSKVMDLCLCSGAGGRGHYCKSISSRRRYNRDLEQDEAFIPVGESLKDLIDQSQSSGSGSGLPLLVQRTIAKQIQMVRQVGKGRYGEVWMGKWRGEKVAVKVFFTTEEASWFRETEIYQTVLMRHENILGFIAADIKGTGSWTQLYLITDYHENGSLYDFLKCATLDTRALLKLAYSAACGLCHLHTEIYGTQGKPAIAHRDLKSKNILIKKNGSCCIADLGLAVKFNSDTNEVDVPLNTRVGTKRYMAPEVLDESLNKNHFQPYIMADIYSFGLIIWEMARRCITGGIVEEYQLPYYNMVPSDPSYEDMREVVCVKRLRPIVSNRWNSDEVSGTQSPEEVIRKCHQIYSLLTEHLFTFQCLRAVLKLMSECWAHNPASRLTALRIKKTLAKMVESQDVKI

SEQ ID NO: 174 - protein, 533 aa, Homo sapiens
MYQPNTLDPIFGMMFELTCNIPLEKDLEIQLYDFDLFSPDDKIGTTVIDLENRLLSGFGAHCGLSKSYCQSGPFRWRDQMPPSYLLERYAKRKGLPPPLFSPEEDAVFYNGKKFKLQSFEPKTPTVHGLGPKKERLALYLLHTQGLVPEHVETRTLYSHSQPGIDQGKVQMWVDIFPKKLGPPGPQVNINPRKPKRYELRCIIWKTANVDLVDDNLSREKTSDIYIKGWLYGLEKDMQKTDIHYHSLTGEADFNWRFIFTMDYLAAERTCVQSQKDYIWSLDATSMKFPARLIIQVWDNDIFSPDDFLGVLELDLSDMPLPARHAKQCSIRMMDADPKWPYFIQYKHFSLFKKKTVTGWWPCQVLDGGKWRLSGKVKMSLEILSEKEALIKPAGRGQSEPNQYPTLHPPLRTNTSFTWLRSPVQNFCYIFWKRYRFKLIAFMVISIIALMLFNFIYSAPHYLAMSWIKPQLQLYPPIKIFNIINSLNTSNASSSILPTQDPNLKPTIDHEWKLHPGPTNHLSDIFPELPAPGD

SEQ ID NO: 175 - protein, 802 aa, Homo sapiens
MKKASSPQLLVEFGEESLRTEPIRDFQTNPNFPESESVLVLTVLMPTEEAYALPLVVKVVDNWAFGQQTVTGQANIDFLQPYFCDPWAQDYMHPKLPTLSEKKHQDFLGYLYRKFWFKSSKAEDEYEHEVDWWSKLFWATDEHKSLKYKYKDYHTLKVYECELEAVPAFQGLQDFCQTFKLYQEQPKLDSPVVGEFKGLFRIYPFPENPEAPKPPLQFLVWPEREDFPQPCLVRVYMVRAINLQPQDYNGLCDPYVILKLGKTELGNRDMYQPNTLDPIFGMMFELTCNIPLEKDLEIQLYDFDLFSPDDKIGTTVIDLENRLLSGFGAHCGLSKSYCQSGPFRWRDQMPPSYLLERYAKRKGLPPPLFSPEEDAVFYNGKKFKLQSFEPKTPTVHGLGPKKERLALYLLHTQGLVPEHVETRTLYSHSQPGIDQGKVQMWVDIFPKKLGPPGPQVNINPRKPKRYELRCIIWKTANVDLVDDNLSREKTSDIYIKGWLYGLEKDMQKTDIHYHSLTGEADFNWRFIFTMDYLAAERTCVQSQKDYIWSLDATSMKFPARLIIQVWDNDIFSPDDFLGVLELDLSDMPLPARHAKQCSIRMMDADPKWPYFIQYKHFSLFKKKTVTGWWPCQVLDGGKWRLSGKVKMSLEILSEKEALIKPAGRGQSEPNQYPTLHPPLRTNTSFTWLRSPVQNFCYIFWKRYRFKLIAFMVISIIALMLFNFIYSAPHYLAMSWIKPQLQLYPPIKIFNIINSLNTSNASSSILPTQDPNLKPTIDHEWKLHPGPTNHLSDIFPELPAPGD

SEQ ID NO: 176 - protein, 1207 aa, Homo sapiens
MLKFAARCLTGYSQSRASLPTTLSFKDTFIIKGGVEDLEPDASCWPLRVLSLPWGAVLGGERGHADKSLRFPGWRHQQESGGGRGPTMPATPNFLANPSSSSRWIPLQPMPVAWAFVQKTSALLWLLLLGTSLSPAWGQAKIPLETVKLWADTFGGDLYNTVTKYSGSLLLQKKYKDVESSLKIEEVDGLELVRKFSEDMENMLRRKVEAVQNLVEAAEEADLNHEFNESLVFDYYNSVLINERDEKGNFVELGAEFLLESNAHFSNLPVNTSISSVQLPTNVYNKDPDILNGVYMSEALNAVFVENFQRDPTLTWQYFGSATGFFRIYPGIKWTPDENGVITFDCRNRGWYIQAATSPKDIVILVDVSGSMKGLRMTIAKHTITTILDTLGENDFINIIAYNDYVHYIEPCFKGILVQADRDNREHFKLLVEELMVKGVGVVDQALREAFQILKQFQEAKQGSLCNQAIMLISDGAVEDYEPVFEKYNWPDCKVRVFTYLIGREVSFADRMKWIACNNKGYYTQISTLADTQENVMEYLHVLSRPMVINHDHDIIWTEAYMDSKLLSSQAQSLTLLTTVAMPVFSKKNETRSHGILLGVVGSDVALRELMKLAPRYKLGVHGYAFLNTNNGYILSHPDLRPLYREGKKLKPKPNYNSVDLSEVEWEDQAESLRTAMINRETGTLSMDVKVPMDKGKRVLFLTNDYFFTDISDTPFSLGVVLSRGHGEYILLGNTSVEEGLHDLLHPDLALAGDWIYCITDIDPDHRKLSQLEAMIRFLTRKDPDLECDEELVREVLFDAVVTAPMEAYWTALALNMSEESEHVVDMAFLGTRAGLLRSSLFVGSEKVSDRKFLTPEDEASVFTLDRFPLWYRQASEHPAGSFVFNLRWAEGPESAGEPMVVTASTAVAVTVDKRTAIAAAAGVQMKLEFLQRKFWAATRQCSTVDGPCTQSCEDSDLDCFVIDNNGFILISKRSRETGRFLGEVDGAVLTQLLSMGVFSQVTMYDYQAMCKPSSHHHSAAQPLVSPISAFLTATRWLLQELVLFLLEWSVWGSWYDRGAEAKSVFHHSHKHKKQDPLQPCDTEYPVFVYQPAIREANGIVECGPCQKVFVVQQIPNSNLLLLVTDPTCDCSIFPPVLQEATEVKYNASVKCDRMRSQKLRRRPDSCHAFHPEENAQDCGGASDTSASPPLLLLPVCAWGLLPQLLR

SEQ ID NO: 177 - protein, 675 aa, Homo sapiens
MGIYGSVPYLLAHKLGRTIGIFWLNASETLVEINTEPAVEYTLTQMGPVAAKQKVRSRTHVHWMSESGIIDVFLLTGPTPSDVFKQYSHLTGICTKKCQFLVLLHIQCPMCHHGTQAMPPLFSLGYHQCRWNYEDEQDVKAVDAGFDEHDIPYDAMWLDIEHTEGKRYFTWDKNRFPNPKRMQELLRSKKRKLVVISDPHIKIDPDYSVYVKAKDQGFFVKNQEGEDFEGVCWPGLSSYLDFTNPKVREWYSSLFAFPVYQGSTDILFLWNDMNEPSVFRGPEQTMQKNAIHHGNWEHRELHNIYGFYHQMATAEGLIKRSKGKERPFVLTRSFFAGSQKYGAVWTGDNTAEWSNLKISIPMLLTLSITGISFCGADIGGFIGNPETELLVRWYQAGAYQPFFRGHATMNTKRREPWLFGEEHTRLIREAIRERYGLLPYWYSLFYHAHVASQPVMRPLWVEFPDELKTFDMEDEYMLGSALLVHPVTEPKATTVDVFLPGSNEVWYDYKTFAHWEGGCTVKIPVALDTIPVFQRGGSVIPIKTTVGKSTGWMTESSYGLRVALSTKGSSVGELYLDDGHSFQYLHQKQFLHRKFSFCSSVLINSSADQRGHYPSKCVVEKILVLGFRKEPSSVTTHSSDGKDQPVAFTYCAKTSILSLEKLSLNIATDWEVRII

SEQ ID NO: 178 - protein, 83 aa, Homo sapiens
MDAVKHPTVQAQPPTTKSCLAQISTVLQCRNLIVGFLLMQNSHKNLSLFLSLIICLIHPKRKGEGHQFTYTPVAPSPLKIFIK

SEQ ID NO: 179 - protein, 843 aa, Homo sapiens
MCGLLADPGVPLLVAMAPAGAARAGVGLGVSGIPGPVLHPGLDLDPRALQRPSVGFQAEEILRHPGAAGSCYLAPSVSTARCCLSCLSVFLLNSDSQPAEHPHTHSGVGAQLPVYLVSLVQPGALPRPPQAGVDMAETLEFNDVYQEVKGSMNDGRLRLSRQGIIFKNSKTGKVDNIQAGELTEGIWRRVALGHGLKLLTKNGHVYKYDGFRESEFEKLSDFFKTHYRLELMEKDLCVKGWNWGTVKFGGQLLSFDIGDQPVFEIPLSNVSQCTTGKNEVTLEFHQNDDAEVSLMEVRFYVPPTQEDGVDPVEAFAQNVLSKADVIQATGDAICIFRELQCLTPRGRYDIRIYPTFLHLHGKTFDYKIPYTTVLRLFLLPHKDQRQMFFVISLDPPIKQGQTRYHFLILLFSKDEDISLTLNMNEEEVEKRFEGRLTKNMSGSLYEMVSRVMKALVNRKITVPGNFQGHSGAQCITCSYKASSGLLYPLERGFIYVHKPPVHIRFDEISFVNFARGTTTTRSFDFEIETKQGTQYTFSSIEREEYGKLFDFVNAKKLNIKNRGLKEGMNPSYDEYADSDEDQHDAYLERMKEEGKIREENANDSSDDSGEETDESFNPGEEEEDVAEEFDSNASASSSSNEGDSDRDEKKRKQLKKAKMAKDRKSRKKPVEVKKGKDPNAPKRPMSAYMLWLNASREKIKSDHPGISITDLSKKAGEIWKGMSKEKKEEWDRKAEDARRDYEKAMKEYEGGRGESSKRDKSKKKKKVKVKMEKKSTPSRGSSSKSSSRQLSESFKSKEFVSSDESSSGENKSKKKRRRSEDSEEEELASTPPSSEDSASGSDE

SEQ ID NO: 180 - protein, 686 aa, Homo sapiens
MAIGLLMAQEGHCKDSSAMGEEAHHPLTPATPPFPPLSPDWGHMQPDFFVPVAVPAVFRGPPQLQCHGRRLFLNSPCAQKSSSGLVVEPGLSRTLLEMVKLTSMRGQFLEAQIPTGISLTLQYQLYQKQTNKNMSYSFVLFLKWVALGQGRRAGYPSLEDADSRRFNGSRSFLITVIGITLTVEIVTSGMMKGTRVRWSGAGNEGMMGLEEGRNERSVKEAPPRRAVEAQPKDRTWDVGKGQGTEGEGRGLEVEGQQHQGSEPGTIPFSVSWGVLLLAGLCCLVPSSLVEDPQEDAAQKTDTSHHDQGDWEDLACQKISYNVTDLAFDLYKELADLSQTSNVLVTPTSVAMAFAMLSLGTKADTRTEILEGLNVNLTETPEAKIHECFQQVLQALSRPDTRLQLTTGSSLFVNKSMKLVDTFLEDTKKLYHSEASSINFRDTEEAKEQINNYVEKRTGRKVVDLVKHLKKDTSLALVDYISFHGKWKDKFKAERIMVEGFHVDDKTIIRVPMINHLGRFDIHRDRELSSWVLAQHYVGNATAFFILPDPKKMWQLEEKLTYSHLENIQRAFDIRSINLHFPKLSISGTYKLKRVPRNLGITKIFSNGADLSGVREEAPLKLSKAVHKAVLTIDEKGTEAAGAMFLEAIPMSIPPGVKFKKPFVFLMIEQNTKSPLFMGKVVNPTQK

SEQ ID NO: 181 - protein, 566 aa, Homo sapiens [sequence omitted]

SEQ ID NO: 182 - protein, 295 aa, Homo sapiens [sequence omitted]

SEQ ID NO: 183 - protein, 561 aa, Homo sapiens
MANMNSDSRHLGTSEVDHERDPGPMNIQFEPSDLRSKRPFCIEPTNIVNVNHVIQRVSDHASAMNKRIHYYSRLTTPADKALIAPDHVVPAPEECYVYSPLGSAYKLQSYTEGYGKNTSLVTIFMIWNTMMGTSILSIPWGIKQAGFTTGMCVIILMGLLTLYCCYRVVKSRTMMFSLDTTSWEYPDVCRHYFGSFGQWSSLLFSLVSLIGAMIVYWVLMSNFLFNTGKFIFNFIHHINDTDTILSTNNSNPVICPSAGSGGHPDNSSMIFYANDTGAQQFEKWWDKSRTVPFYLVGLLLPLLNFKSPSFFSKFNILGTVSVLYLIFLVTFKAVRLGFHLEFHWFIPTEFFVPEIRFQFPQLTGVLTLAFFIHNCIITLLKNNKKQENNVRDLCIAYMLVTLTYLYIGVLVFASFPSPPLSKDCIEQNFLDNFPSSDTLSFIARIFLLFQMMTVYPLLGYLARVQLLGHIFGDIYPSIFHVLILNLIIVGAGVIMACFYPNIGGIIRYSGAACGLAFVFIYPSLIYIISLHQEERLTWPKLIFHVFIIILGVANLIVQFFM

SEQ ID NO: 184 - protein, 369 aa, Homo sapiens
MVKLSIVLTPQFLSHDQGQLTKELQQHVKSVTCPCEYLRKVINTLADHHHRGTDFGGSPWLHVIIAFPTSYKVVITLWIVYLWVSLLKTIFWSRNGHDGSTDVQQRARRSNRRRQEGIKIVLEDIFTLWRQVETKVRAKIRKMKVTTKVNRHDKINGKRKTAKEHLRKLSMKEREHGEKERQVSEAEENGKLDMKEIHTYMEMFQRAQALRRRAEDYYRCKITPSARKPLCNRVRMAAVEHRHSSGLPYWPYLTAETLKNRMGHQPPPPTQQHSIIDNSLSLKTPSECLLTPLPPSALPSADDNLKTPAECLLYPLPPSADDNLKTPPECLLTPLPPSAPPSADDNLKTPPECVCSLPFHPQRMIISRN

SEQ ID NO: 185 - protein, 272 aa, Homo sapiens [sequence omitted]

SEQ ID NO: 186 - protein, 141 aa, Homo sapiens
MFACSKFVSTPSLVNRALQLLSRPLSAMVLKRPEILTDESLSSLAVSCPLTSLDSSRSFQTSAISRDIDTAAKFIGTGAVTVGVAGFGAGIGTVFGSLIIGYARNPFLKQQLFSYAILGFALSEAMGLFCLKEAFFILFAM

SEQ ID NO: 187 - protein, 1068 aa, Homo sapiens
MVSGDGRPKSRSVSGLRAGSGSWKRALPRRRIPCFSRLESLGRRPGPRGSGCAPLGACLLGRPLSLGRGSWGSRSPPSCATPAGRATPPLALTRTPLSPVAAACCQRLPGPRYAFEYLIETLNDSSHKKFFDVSKLGTKYDVLPYSIRVLLEAAVRNCDGFLMKKEDVMNILDWKTKQSNVEVPFFPARVLLQDFTGIPAMVDFAAMREAVKTLGGDPEKVHPACPTDLTVDHSLQIDFSKCAIQNAPNPGGGDLQKAGKLSPLKVQPKKLPCRGQTTCRGSCDSGELGRNSGTFSSQIENTPILCPFHLQPVPEPETVLKNQEVEFGRNRERLQFFKWSSRVLKNVAVIPPGTGMAHQINLEYLSRVVFEEKDLLFPDSVVGTDSHITMVNGLGILGWGVGGIETEAVMLGLPVSLTLPEVVGCELTGSSNPFVTSIDVVLGITKHLRQVGVAGKFVEFFGSGVSQLSIVDRTTIANMCPEYGAILSFFPVDNVTLKHLEHTGFSKAKLESMETYLKAVKLFRNDQNSSGEPEYSQVIQINLNSIVPSVSGPKRPQDRVAVTDMKSDFQACLNEKVGFKGFQIAAEKQKDIVSIHYEGSEYKLSHGSVVIAAVISCTNNCNPSVMLAAGLLAKKAVEAGLRVKPYIRTSLSPGSGMVTHYLSSSGVLPYLSKLGFEIVGYGCSTCVGNTAPLSDAVLNAVKQGDLVTCGILSGNKNFEGRLCDCVRANYLASPPLVVAYAIAGTVNIDFQTEPLGTDPTGKNIYLHDIWPSREEVHRVEEEHVILSMFKALKDKIEMGNKRWNSLEAPDSVLFPWDLKSTYIRCPSFFDKLTKEPIALQAIENAHVLLYLGDSVTTDHISPAGSIARNSAAAKYLTNRGLTPREFNSYGARRGNDAVMTRGTFANIKLFNKFIGKPAPKTIHFPSGQTLDVFEAAELYQKEGIPLIILAGKKYGSGNSRDWAAKGPYLLGVKAVLAESYEKIHKDHLIGIGIAPLQFLPGENADSLGLSGRETFSLTFPEELSPGITLNIQTSTGKVFSVIASFEDDVEITLYKHGGLLNFVARKFS

SEQ ID NO: 188 - protein, 198 aa, Homo sapiens
MYKENLVRIFRKKKRICHSFSSLFNLSTSKSWLHGSIFGDINSSPSEDNWLKGTRRLDTDHCNGNADDLDCSSLTDDWESGKMNAESVITSSSSHIISQPPGGNSHSLSLQSQLTASERFQENSSDHSETRLLQEVFFQAILLAVCLIISACARWFMGEILASVFTCSLMITVAYVKSLFLSLASYFKTTACARFVKI

SEQ ID NO: 189 - protein, 294 aa, Homo sapiens [sequence omitted]

SEQ ID NO: 190 - protein, 248 aa, Homo sapiens
MRLHRSPDRLPLYLSPKPRLLTNGYYIWTEDSFLCDKDGNITLNPSQTSVMYKENLVRIFRKKKRICHSFSSLFNLSTSKSWLHGSIFGDINSSPSEDNWLKGTRRLDTDHCNGNADDLDCSSLTDDWESGKMNAESVITSSSSHIISQPPGGNSHSLSLQSQLTASERFQENSSDHSETRLLQEVFFQAILLAVCLIISACARWFMGEILASVFTCSLMITVAYVKSLFLSLASYFKTTACARFVKI

SEQ ID NO: 191 - protein, 160 aa, Homo sapiens
MSEASRLCSGYYSLNQSFVEPFQCPRRGEGAALQYCCGFADLKYCCSEPGSYFPYKHSYMWSLSIGALIGLGIAALVLLAFVISVCVLCYLFLYTKPQRLDTGLKLQHLEASSTQEGKSNGKTKALNSNAASNATNETYYEADDIIQEKTMDATQIHIAY

SEQ ID NO: 192 - protein, 394 aa, Homo sapiens
MSLRQRLAQLVGRLQDPQKVARFQRRNQCPAKPDGGGAPNGVRNGLAAELGPASPRRAGALRRNSLTGEEGQLARVSNWPLYCLFCFGTELGNELFYILFFPFWIWNLDPLVGRRLVVIWVLVMYLGQCTKDIIRWPRPASPPVVKLEVFYNSEYSMPSTHAMSGTAIPISMVLLTYGRWQYPLIYGLILIPCWCSLVCLSRIYMGMHSILDIIAGFLYTILILAVFYPFVDLIDNFNQTHKYAPFIIIGLHLALGIFSFTLDTWSTSRGDTAEILGSGAGIACGSHVTYNMGLVLDPSLDTLPLAGPPITVTLFGKAILRILIGMVFVLIIRDVMKKITIPLACKIFNIPCDDIRKARQHMEVELPYRYITYGMVGFSITFFVPYIFFFIGIS

SEQ ID NO: 193 - protein, 336 aa, Homo sapiens
MRYVRLTLSGIHPRPITGSPSPLKESFGGCCVSGLIAMGTKAQVERKLLCLFILAILLCSLALGSVTVHSSEPEVRIPENNPVKLSCAYSGFSSPRVEWKFDQGDTTRLVCYNNKITASYEDRVTFLPTGITFKSVTREDTGTYTCMVSEEGGNSYGEVKVKLIVLVPPSKPTVNIPSSATIGNRAVLTCSEQDGSPPSEYTWFKDGIVMPTNPKSTRAFSNSSYVLNPTTGELVFDPLSASDTGEYSCEARNGYGTPMTSNAVRMEAVERNVGVIVAAVLVTLILLGILVFGIWFAYSRGHFDRTKKGTSSKKVIYSQPSARSEGEFKQTSSFLV

SEQ ID NO: 194 - protein, 137 aa, Homo sapiens
MGVVAVERKWVSTTIKPLCARPELVRTACQSLVSDTMGTRLLPALFLVLLVLGFEVQGTQQPQQDEMPSPTFLTQVKESLSSYWESAKTAAQNLYEKTYLPAVDEKLRDLYSKSTAAMSTYTGIFTDQVLSVLKGEE

SEQ ID NO: 195 - protein, 208 aa, Homo sapiens
MIIYRDLISHDEMFSDIYKIREIADGLCLEVEGKMVSRTEGNIDDSLIGGNASAEGPEGEGTESTVITGVDIVMNHHLQETSFTKEAYKKYIKDYMKSIKGKLEEQRPERVKPFMTGAAEQIKHILANFKNYQFFIGENMNPDGMVALLDYREGWCDPIYDSSLRMVRTWTSCSHMWHLFGLLSPVIILVLLVIHTNTGLRPHGTDVI

SEQ ID NO: 196 - protein, 812 aa, Homo sapiens
MGAGPRGMVFSWVPRVRDILIVYSPDAEEWCQYLQTLFLSSRQVRSQKILTHRLGPEASFSAEDLSLFLSTRCVVVLLSAELVQHFHKPSLLPLLQRAFHPPHRVVRLLCGVRDSEEFLDFFPDWAHWQELTCDDEPETYVAAVKKAISEDSGCDSVTDTEPEDEKVVSYSKQQNLPTVTSPGNLMVVQPDRIRCGAETTVYVIVRCKLDDRVATEAEFSPEDSPSVRMEAKVENEYTISVKAPNLSSGNVSLKIYSGDLVVCETVISYYTDMEEIGNLLSNAANPVEFMCQAFKIVPYNTETLDKLLTESLKNNIPASGLHLFGINQLEEEDMMTNQRDEELPTLLHFAAKYGLKNLTALLLTCPGALQAYSVANKHGHYPNTIAEKHGFRDLRQFIDEYVETVDMLKSHIKEELMHGEEADAVYESMAHLSTDLLMKCSLNPGCDEDLYESMAAFVPAATEDLYVEMLQASTSNPIPGDGFSRATKDSMIRKFLEGNSMGMTNLERDQCHLGQEEDVYHTVDDDEAFSVDLASRPPVPVPRPETTAPGAHQLPDNEPYIFKVFAEKSQERPGNFYVSSESIRKGPPVRPWRDRPQSSIYDPFAGMKTPGQRQLITLQEQVKLGIVNVDEAVLHFKEWQLNQKKRSESFRFQQENLKRLRDSITRRQREKQKSGKQTDLEITVPIRHSQHLPAKVEFGVYESGPRKSVIPPRTELRRGDWKTDSTSSTASSTSNRSSTRSLLSVSSGMEGDNEDNEVPEVTRSRSPGPPQVDGTPTMSLERPPRVPPRAASQRPPTRETFHPPPPVPPRGR

SEQ ID NO: 197 - protein, 276 aa, Homo sapiens
MWGCKMCFGILGKKECYINSCFQEIMKKTSIYHLPSFHYLMDSEAQEDTREAYDDKQVVTEIMARCFIPTLITTTSWESFHFIGHEIRITEAMDCYGAVVWPSALVLCYFLETNAKQYNMVDKNVIEIGAGTGLVSIVASLLGAHVTATDLPELLGNLQYNISRNTKMKSKHLPQVKELSWGVALDTNFPRSSNNFDYILAADVVYAHPFLEELLITFDHLCKETTIILWAMKFRLEKENKFVDRFKELFDLEEISSFPSLNIKLYKAVKKNRRSV

SEQ ID NO: 198 - protein, 237 aa, Homo sapiens
MSSKKAKTKTTKKRPQRATSNVFAMFDQSQIQEFKEAFNMIDQNRDGFIDKEDLHDMLASLGKNPTDAYLDAMMNEAPGPINFTMFLTMFGEKLNGTDPEDVIRNAFACFDEEATGTIQEDYLRELLTTMGDRFTDEEVDELYREAPIDKKGNFNYIEFTRILKHGAKTKMTERTLAKIFQLHCLTLFYFSDTSPTLIEPVACNLVSQLCLFFLMYLFQTFLPLSTCIIRLEMGMRV

SEQ ID NO: 199 - protein, 160 aa, Homo sapiens
MEGWGGGGTHRCVSERSPLRAFLEMEPISLSSMKGGLPGPPLAAGPPTPGLPPAPPHIGPSCFQLLQRAFAAKASSSPLLRPSMATPTQTPTKAPEEPDPFYYDYNTVQTVGMTLATILFLLGILIVISKKVKCRKADSSPTCKSCKSELPSSAPGGGGV

SEQ ID NO: 200 - protein, 417 aa, Homo sapiens
MNWAAFGGSEFFIPEGIQIDSRCPLSRNITEWYHYYGIAVKESSQYYDVMYSKKGAAWVSETGKKEVSKQTVAYSPRSKLGTLLPEFPNVKDLNLPASLPEEKVSTFIMMYRTHCQRILDTVIRANFDEVQSFLLHFWQGMPPHMLPVLGSSTVVNIVGVCDSILYKAISGVLMPTVLQALPDSLTQVIRKFAKQLDEWLKVALHDLPENLRNIKFEYEALRGKESSPKAAPPHISKSSLPGISNRIHSADITFQMLEDWRNVDLNSITKQTLYTMEDSRDEHRKLITQYVALVKYNCSDACGVLLCLTVYQEFDHLLEEQSPIESYIEWLDTMVDRCVVKVGGCQETRVLEESGPAVPLDVVLFRHKGDPGHDLAQRPQLRLSVSPFHFPVFIDIHYPHRCDTLAMNCLLPNNLND

SEQ ID NO: 201 - protein, 358 aa, Homo sapiens
MGGSEGIVESIQIMKEGKATASEAVDCKWYIRAPPRSKIYLRFLDYEMQNSNECKRNFVAVYDGSSSVEDLKAKFCSTVANDVMLRTGLGVIRMWADEGSRNSRFQMLFTSFQEPPCEGNTFFCHSNMCINNTLVCNGLQNCVYPWDENHCKEKRKTSLLDQLTNTSGTVIGVTSCIGIILIIISVIVQIKQPRKKYVQRKSDFDQTVFQEVFEPPHYELCTLRGTGATADFADVADDFENYHKLRRSSSKCIHDHHCGSQLSSTKGSRSNLSTRDASILTEMPTQPGKPLIPPMNRRNILVMKHNYSQDAADACDIDEIEEVPTTSHRLSRHDKAVQRFCLIGSLSKHESEYNTTRV

SEQ ID NO: 202 - protein, 178 aa, Homo sapiens
MLSARDRRDRHPEEGVVAELQGFAVDKAFLTSHKGILLETELALTLIIFICFTASISAYMAAALLEFFITLAFLFLYATQYYQRFDRINWPCLDFLRCVSAIIIFLVVSFAAVTSRDGAAIAAFVFGIILVSIFAYDAFKIYRTEMAPGAARGTSSDSGANWLLSPAAERKVEPRHVS

SEQ ID NO: 203 - protein, 107 aa, Homo sapiens
MASGAARWLVLAPDRSGALQTGPSLRKHGDVSAAWSGSSRSLVPVRSYIVTRSGAILPKPGKTDIGLLRVFSIVIPFLYVGTLISKNFAALLEEHDIFVPEDDDDDD

SEQ ID NO: 204 - protein, 349 aa, Homo sapiens
MAEMTEVEFRIWIGTKIIKIQEKVKTQSKESKEYHKMIQELKDEMAILRKNQTDLIELKNSLYEFHNTITSVSSRIDQTEERISELEDWFSKVLAMGDKGTGNHSDVTDFILEGFRVRPEFYILLFFLFLLIYSMVLLGNISVMTIIVTDSQLNTPMYFFLGNLSFIDVSYSTVIAPKAMAHFLSEKKTVSFAGCVAQLFLFALFIVTEGFVLAAMAYDRFSAICNPLLHSVHMSRRLCTQLVAGSYFCGWASSILQVSVTFSVSFCASRVIAHFYCDSYQIEKISCSNLFVNKMVSLSLSVIIILPTIVVIIVSYLYIVSSVLKIPSSEGRKKDFSTCSSHRGVVSLL

SEQ ID NO: 205 - protein, 384 aa, Homo sapiens
MLTSMAYDCCVAICYPLLYNIAMSPKVCSSHMLGSYFWPFSGAMAHTRCMLKLTSCEANTINHYFRDTLHVFQLSCTSTYIRAEFILAGLTQRPELQLPLFLLFLGIYVVTVVGNLGMIFLIALSSQLYPPVYYFLSHLSFIDLCYSSVITPKMLVNFVPEENIISFLECITQLYFFLIFVIAEGYLLTAMEYDRYVAICRPLLYNIVMSHRVCSIMMAVVYSLGFLWATVHTTRMSVLSFCRSHTVSHYFCDILPLLTLSCSSTHINEILLFIIGGVNTLATTLAVLISYAFIFSSILGIHSTEGQSKAFGTCSSHLLAVGIFFGSITFMYFKPPSSTTMEKEKVSSVFYITIIPMLNPLIYSLRNKDVKNALKKMTRGRQSS

SEQ ID NO: 206 - protein, 122 aa, Homo sapiens
MNPSEMQRKVPPQRQKTCNRASSTRQVNKMVISEEQMKLPSTKEAELPTWAQLKKLTQLAEKSLKKTRVTQTPENMLLAVLMIVSTVVSLPMSAGAAAANYTYWAYVPFLLLIWAVIWMDNH

SEQ ID NO: 207 - protein, 101 aa, Homo sapiens
MERPDKAALNALQPPEFRNESSLASTLKTLLFFTALMITVPIGLYFTTKSYIFEGALGMSNRDSYFYAAIVAVVAVHVVLALFVYVAWNEGSRQWREGKQD

SEQ ID NO: 208 - protein, 1574 aa, Homo sapiens
MVEAKGKARKPHGPWGRCTGDCGPGGVQSRAVWCFHVDGWTSHLSNCGESNRPPKERSCFRVCDWHSDLFQWEVSDWHHCVLVPYARGEVKPRTAECVTAQHGLQHRMVRCIQKLNRTVVANEICEHFALQPPTEQACLIPCPRDCVVSEFLPWSNCSKGCGKKLQHRTRAVIAPPLFGGLQCPNLTESRACDAPISCPLGEEEYTFSLKVGPWSKCRLPHLKEINPSGRTVLDFNSDSNERVTFKHQSYKAHHHSKSWAIEIGYQTRQVSCTRSDGQNAMLSLCLQDSFPLTVQSCIMPKDCETSQWSSWSPCSKTCRSGSLLPGFRSRSRNVKHMAIGGGKECPELLEKEACIVEGELLQQCPRYSWRTSEWKECQVSLLLEQQDPHWHVTGPVCGGGIQTREVYCAQSVPAAAALRAKEVSRPVEKALCVGPAPLPSQLCNIPCSTDCIVSSWSAWGLCIHENCHEPQGKKGFRTRQRHVLMESTGPAGHCPHLVESVPCEDPMCYRWLASEGICFPDHGKCGLGHRILKAVCQNDRGEDVSGSLCPVPPPPERKSCEIPCRMDCVLSEWTEWSSCSQSCSNKNSDGKQTRSRTILALAGEGGKPCPPSQALQEHRLCNDHSCMQLHWETSPWGPCSEDTLVTALNATIGWNGEATCGVGIQTRRVFCVKSHVGQVMTKRCPDSTRPETVRPCFLPCKKDCIVTAFSEWTPCPRMCQAGNATVKQSRYRIIIQEAANGGQECPDTLYEERECEDVSLCPVYRWKPQKWSPCILVPESVWQGITGSSEACGKGLQTRAVSCISDDNRSAEMMECLKQTNGMPLLVQECTVPCREDCTFTAWSKFTPCSTNCEATKSRRRQLTGKSRKKEKCQDSDLYPLVETELCPCDEFISQPYGNWSDCILPEGRREPHRGLRVQADSKECGEGLRFRAVACSDKNGRPVDPSFCSSSGYIQEKCVIPCPFDCKLSDWSSWGSCSSSCGIGVRIRSKWLKEKPYNGGRPCPKLDLKNQAQVHEAVPCYSECNQYSWVVEHWSSCKINNELRSLRCGGGTQSRKIRCVNTADGEGGAVDSNLCNQDEIPPETQSCSLMCPNECVMSEWGLWSKCPQSCDPHTMQRRTRHLLRPSLNSRTCAEDSQVQPCLLNENCFQFQYNLTEWSTCQLSENAPCGQGVRTRLLSCVCSDGKPVSMDQCEQHNLEKPQRMSIPCLVECVVNCQLSGWTAWTECSQTCGHGGRMSRTRFIIMPTQGEGRPCPTELTQEKTCPVTPCYSWVLGNWSACKLEGGDCGEGVQIRSLSCMVHSGSISHAAGRVEDALCGEMPFQDSILKQLCSVPCPGDCHLTEWSEWSTCELTCIDGRSFETVGRQSRSRTFIIQSFENQDSCPQQVLETRPCTGGKCYHYTWKASLWNNNERTVWCQRSDGVNVTGGCSPQARPAAIRQCIPACRKPFSYCTQGGVCGCEKGYTEIMRSNGFLDYCMKVPGSEDKKADVKNLSGKNRPVNSKIHDIFKGWSLQPLDPDGRVKIWVYGVSGGAFLIMIFLIFTSYLVCKKPKPHQSTPPQQKPLTLAYDGDLDM

SEQ ID NO: 209 - protein, 345 aa, Homo sapiens
MPKRKAEGDAKGDKAKVKDEPQRRSARLSAKPAPPKPEPKPKKAPAKKAKGKKGKADAGKEGNNPAENGDAKTDQAQKAEGAGDAKSPEEESTSNEQGGHHQSQSSLGNTKTRQKPFPSNRVETPTNPFHETHISARPILTEATRSQTCHMYEKFKFKRGEEQFYGTRLQVMDTKFRENEELERCSAMTQNGPSNHTKSNTQQLETPSPQFSVFFLDWFLIHASQICKIIRRIKYILKTKSKKVIKKDSAASEEILNVQREKLSVRQPMSRPWYVSIFFLGDEEASPVSKNLLKVTLPEGGRASWCDTLIGTQAIPVLIAPQNQALFVLACGEAPPYFPKGNPAN

SEQ ID NO: 210 - protein, 117 aa, Homo sapiens
MNHTVQTLFTPANTGRSTNHEMLKEKHEVAVLGAPHNPVPPAFTMIHICSETSVPDHVVWSLFNTLFKNSCCPDFIAFIYSACVSTAKCLNIWALILGILMTILLIIIPVLVVQAQR

SEQ ID NO: 211 - protein, 602 aa, Homo sapiens
MGSNSSRIGDLPKNEYLKKLSGTESISENDPFWNQLLSFSFPAPTSSSELKLLEEATISVCRSLVENNPRTGNLGALIKVFLSRTKELKLSAECQNHIFIWQTHNALFIICCLLKVFICQMSEEELQLHFTYEEKSPGNYSSDSEDLLEELLCCLMQLITDIPLLDITYEISVEAISTMVVFLSCQLFHKEVLRQSISHKYLMRGPCLPYTSKLVKTLLYNFIRQEKPPPPGAHVFPQQSDGGGLLYGLASGVATGLWTVFTLGGVGSKAAASPELSSPLANQSLLLLLVLANLTDASDAPNPYRQAIMSFKNTQDSSPFPSSIPHAFQINFNSLYTALCEQQTSDQATLLLYTLLHQNSNIRTYMLARTDMENLVLPILEILYHVEERNSHHVYMALIILLILTEDDGFNRSIHEVILKNITWYSERVLTEISLGSLLILVVIRTIQYNMTRTRDKYLHTNCLAALANMSAQFRSLHQYAAQRIISLFSLLSKKHNKVLEQATQSLRGSLSSNDVPLPDYAQDLNVIEEVIRMMLEIINSCLTNSLHHNPNLVYALLYKRDLFEQFRTHPSFQDIMQNIDLVSVNEDIYYDSFLSIKAENV

SEQ ID NO: 212 - protein, 229 aa, Homo sapiens [sequence omitted]

SEQ ID NO: 213 - protein, 480 aa, Homo sapiens
MNKQRGTYSEVSLAQDPKRQQRKLKGNKISISGTKQEIFQVELNLQNASSDHQGNDKTYHCKGLLPPPEKLTAEVLGIICIVLMATVLKTIVLIPCIGVLEQNNFSLNRRMQKEMSEFHNYNLDLKKSDFSTRWQKQRCPVVKSKCRENASPFFFCCFIAVAMGIRFIIMVAIWSAVFLNSLFNQEVQIPLTESYCGPCPKNWICYKNNCYQFFDESKNWYESQASCMSQNASLLKVYSKEDQVQQTRSYYRSFGHCLARKVSSPVTACYSCKARPISCMQCPRSDFPPHSPQSTQPVLRDLCLPTSLPALASPETIAFTHFHTPSLPQDSSLDEMSLSHVPDPVNHFHFVSGDISFIQIGRPLLLPPATLGWISGQSLGGDQAPLCPYGTGFPALGLYSLPQFLKCWYRPAAPSSVPLRCQAGCWDVGRAGLYIRVKLSCGTPWMPGLSWPRGPSIAGKGDSKSVISNPDEPPEMYRDI

SEQ ID NO: 214 - protein, 442 aa, Homo sapiens
MQTDPRVGFCRVQDESKSPRLAFEAHHKRLSQPPANDGHLIQTARSGYTDSGYRIRDLDEDFGTATLGWAGQEVQTENVTVAEGGVAEITCRLHQYDGSIVVIQNPARQTLFFNGTRALKDERFQLEEFSPRRVRIRLSDARLEDEGGYFCQLYTEDTHHQIATLTVLVAPENPVVEVREQAVEGGEVELSCLVPRSRPAATLRWYRDRKELKVSDRGVAGVSSSQENGKVWSVASTVRFRVDRKDDGGIIICEAQNQALPSGHSKQTQYVLDVQYSPTARIHASQAVVREGDTLVLTCAVTGNPRPNQIRWNRGNESLPERAEAVGETLTLPGLVSADNGTYTCEASNKHGHARALYVLVVYDPGAVVEAQTSVPYAIVGGILALLVFLIICVLVGMVWCSVRQKGSYLTHEASGLDEQGEVREAFLNGSDGHKRKEEFFI

SEQ ID NO: 215 - protein, 1651 aa, Homo sapiens
MDAVMSDGNLETRLGSTDVAASQHMLVCALQELGNLIHNLGTTAAPLLQDSSTGLLDSILSVILHPSISVRLAAAWCLHCIAVALPSYLTPLLDRCLERLTGHKSSPEAVTGFSFAVAALLGAVKHCPLGIPHGKGKIIMTLAEDLLCSAAQNSRLSAQRTQAGWLLISALMTLGPAVVSHHLARVLLLWKCVFPASPKDLETEKSRGDSFTWQVTLEGRAGALCAIKSFVSHCGDLLTEEVTQRLLPPLPCAVDLLTQLSSILKMYGSPLKTPSVVYRQRLYELLILLPPETYEGNLCAILRELAADLTAPDIQVAASTFLLPPLCHQDDLLILSPFLQETDHRFIEEQLLLGNGVACGSLEYDPYSIYEKDVEGDSVPKPLPPALSVISSASKLFGVVCAHVGETQRLLILEQLLDSIKHTKGARQQVVQLHVVSSVSSFLKYVAGSKGCLGPEEMKRFALTLVMGALESPNPLLRCAAAESWARLAQMVDDGAFTAGLAQVSFDKLKSARDVVTRTGHSLALGSLHRYLGGISSSQHLNSCIGILYTLAQDSTSPDVQTWALHSLSLIIDSAGPLYYVHVEPTLSLIIMLLLNVPPTHAEVHQSLGRCLNALITTLGPELQGNSTSISTLRTSCLLGCAVMQDNPDCLVQAQAISCLQQLHMFAPRHVNLSSLVSCLCVNLCSPYLLLRRAVLACLRQLVQREAAEVSEHAVMLAKDSREELTPDANIREVGLEGALLILLDKETDERLCHDIKETLNYMLTSMAVEKLSLWLKLCKDVLAASADFTAVTCVDTMQEEEGDKGDDASVLTTRRDEKSHPFTNPRWATRVFAAECVCRIINQCENANSAHFDIALAQEMKKRDSRNDFLVLHLADLIRMAFMAATDHSDQLRLSGLEMLLVVIRRFATVPEPEFPGHVILEQYQANVGAALRPAFTSETPPDVTAKACQVCSAWIASGVVSDLNDLRRVHQLLVSSLTKIQAGKEALSHLYNESASTMEILAVLKAWAEVYIIAVQRHKNHRQPLKTTTCLEDGIRNGSCSSDGLLDLVYADLGTLSRLWLAALQDFALLTLPSEFASQLPAEGGAFYTAETSENAKLHYYNSWALILHATALWLTSTGFVVADPDEGASNLSRPVTPTSMCQGSSSGATIKSPEDVYTDRFHLILGISVEFLCSLRSDATMESITACLHALQALLDVPWPRSKIGSDQDLGIELLNVLHRVILTRESPSIQLASLEVVRQIICAAQEHVKEKRRSAEVDDGAAEKETLPEFGEGKDTGGLVPGKSLVFATLELCVCILVRQLPELNPKLTGSPGVKATKPQILLEDGSRLVSAALVILSELPAVCSPEGSISILPTILYLTIGVLRETAVKLPGGQLSSTVAASLQALKGILSSPMARAEKSRTAWTDLLRSALTTILDCWDPVDETHQELDEVSLLTAITVFILSTSPEVTTIPCLQKRCIDKFKATLEIKDPVVQIKTYQLLHSIFQYPNPAVSYPYIYSLASCIMEKLQEIDKRKPENTAELEIFQEGIKVLETLVTVAEEHHRAQLVACLLPILISFLLDENSLGSATSIMRNLHDFALQNLMQIGPQYSSVFKSLVASSPALKARLEAAIKGNQESVKVKIPTSKYTKSPGKNSSIQLKTSFL

SEQ ID NO: 216 - protein, 211 aa, Homo sapiens
MSERWKRRGNSTRTSSLASGAGDPEPDLWIIQPQELVLGTTGDTVFLNCTVLGDGPPGPIRWFQGAGLSREAIYNFGGISHPKETAVQASNNDFSILLQNVSSEDAGTYYCVKFQRKPNRQYLSGQGTSLKVKAKSTSSKEAEFTSEPATEMSPTGLLVVFAPVVLGLKAITLAALLLALATSRRSPGQEDVKTTGPAGAMNTLAWSKGQE

SEQ ID NO: 217 - protein, 398 aa, Homo sapiens
MDGVTPTLSTIRGRTLESSTLHVTPRSLDRNKDQITNIFSGFAGLLAILLVVAVFCILWNWNKRKKRQVPYLRVTVMPLLTLPQTRQRAKNIYDILPWRQEDLGRHESRSMRIFSTESLLSRNSESPEHVPSQAGNAFQEHTAHIHATEYAVGIYDNAMVPQMCGNLTPSAHCINVRASRDCASISSEDSHDYVNVPTAEEIAETLASTKSPSRNLFVLPSTQKLEFTEERDEGCGDAGDCTSLYSPGAEDSDSLSNGEGSSQISNDYVNMTGLDLSAIQERQLWVAFQCCRDYENVPAADPSGSQQQAEKDVPSSNIGHVEDKTDDPGTHVQCVKRTFLASGDYADFQPFTQSEDSQMKHREEMSNEDSSDYENVLTAKLGGRDSEQGPGTQLLPDE

SEQ ID NO: 218 - protein, 523 aa, Homo sapiens
MGGCVERNAMAHRDSEMKEECLREDLKFYFMSPCEKYRARRQIPWKLGLQILKIVMVTTQYHQLKDITLGTLGYGENEDNRIGLKVCKQHYKKGTMFPSNETLNIDNDVELDCVQLDLQDLSKKPPDWKNSSFFRLEFYRYAEIRGIFSKSKYRLPIFCEKKLTFVKYVIWNIIIKIKMMEISKLVSQMHFQNTQKNAQYVLVFDAFVIVICLASLILCTRSIVLALRLRKVRGLIFGARTLEPACLDTDPGLASRCLSSLLWVIDLLVPASLGCYRNGCVGNMKSIWNVLCVSYDKNLLELPRTYFIFERFLNFFLEKYKRPVCDTDQWEFINGWYVLVIISDLMTIIGSILKMEIKAKVLILTMQASLPKVLRFCACAGMIYLGYTFCGWIVLGPYHDKDIEFENLNTVAECLFSLVNGDDMFATFAQIQQKSILVWLFSRLYLYSFISLFIYMILSLFIALITDSYDTIKYVVQAIFLDESRKLPCEEAVQVLAYPCTPVALPCLAVLCLLFVRTCREMV

SEQ ID NO: 219 - protein, 132 aa, Homo sapiens
MCSAGELLRGGDGGERDEDGDALAEREAAGTEWDPGASPRRRGQRPKESEQDVEDSQNHTGEPVGDDYKKMGTLFGELNKNLINMGFTRMYFGERIVEPVIVIFFWVMLWFLGLQALGLVAVLCLVIIYVQQ

SEQ ID NO: 220 - protein, 1210 aa, Homo sapiens
MTRPNALDRCRGKLLVHSLNLLAKQGLRLLRGLRRRNVQKKVALAKKLLAKLRFLAEEPQPPLPDVLVWMLSGQRRVAWARIPAQDVLFSVVEEERGRDCGKIQSLMLTAPGAAPGEVCAKLELFLRLGLGKQAKACTSELPPDLLPEPSAGLPSSLHRDDFSYFQLRAHLYQARGVLAADDSGLSDPFARVLISTQCQTTRVLEQTLSPLWDELLVFEQLIVDGRREHLQEEPPLVIINVFDHNKFGPPVFLGRALAAPRVKLMEDPYQRPELQFFPLRKGPWAAGELIAAFQLIELDYSGRLEPSVPSEVEPQDLAPLVEPHSGRLSLPPNVCPVLREFRVEVLFWGLRGLGRVHLLEVEQPQVVLEVAGQGVESEVLASYRESPNFTELVRHLTVVFKDTAPLFHPQDLPEQPYLQPPLSILVIERRAFGHTVLVGSHIVPHMLRFTFRGHEDPPEEEGEMEETGDMMPKGPQGQKSLDPFLAEAGISRQLLKPPLKKLPLGGLLNQGPGLEEDIPDPEELDWGSKYYASLQELQGQHNFDEDEMDDPGDSDGVNLISMVGEIQDQGEAEVKGTVSPKKAVATLKIYNRSLEEEFNHFEDWLNVFPLYRGQGGQDGGGEEEGSGHLVGKFKGSFLIYPESEAVLFSEPQISRGIPQNRPIKLLVRVYVVKATNLAPADPNGKADPYVVVSAGRERQDTKERYIPKQLNPIFGEILELSISLPAETELTVAVFDHDLVGSDDLIGETHIDLENRFYSHHRANCGLASQYEVDGYNAWRDAFWPSQILAGLCQRCGLPAPEYRAGAVKVGSKVFLTPPETLPPGSSSPTVASGDPEEAQALLVLRRWQEMPGFGIQLVPEHVETRPLYHPHSPGLLQGSLHMWIDIFPQDVPAPPPVDIKPRQPISYELRVVIWNTEDVVLDDENPLTGEMSSDIYVKSWVKGLEHDKQETDVHFNSLTGEGNFNWRFVFRFDYLPTEREVSVWRRSGPFALEEAEFRQPAVLVLQVWDYDRISANDFLGSLELQLPDMVRGARGPELCSVQLARNGAGPRCNLFRCRRLRGWWPVVKLKEAEDVEREAQEAQAGKKKRKQRRRKGRPEDLEFTDMGGNVYILTGKVEAEFELLTVEEAEKRPVGKGRKQPEPLEKPSRPKTSFNWFVNPLKTFVFFIWRRYWRTLVLLLLVLLTVFLLLVFYTIPGQISQVIFRPLHK

SEQ ID NO: 221 - protein, 237 aa, Homo sapiens
MNHRAPANGRYKPTCYEHAANCYTHAFLIVPAIVGSALLHRLSDDCWEKITAWIYGMGLCALFIVSTVFHIVSWKKSHLRLNLRELGPLASHMRWFIWLMAAGGTIYVFLYHEKYKVVELFFYLTMGFSPALVVTSMYRTVILEGRETKKMSFEFTPVVSLETLSKQQQKENNTDGLQELACGGLIYCLGVVFFKSDGIIPFAHAIWHLFVATAAAVHYYAIWKYLYRSPTDFMRHL

SEQ ID NO: 222 - protein, 378 aa, Homo sapiens
MEFCDTVTGQEAQSKRRQDTARSGRRPASNPDIHAVSFLQALRQGSGRPPLGWWGPTGSSTRNMESGNQSTVTEFIFTGFPQLQDGSLLYFFPLLFIYTFIIIDNLLIFSAVRLDTHLHNPMYNFISIFSFLEIWYTTATIPKMLSNLISEKKAISMTGCILQMYFFHSLENSEGILLTTMAIDRYVAICNPLRYQMIMTPRLCAQLSAGSCLFGFLILLPEIVMISTLPFCGPNQIHQIFCDLVPVLSLACTDTSMILIEDVIHAVAIVFSVLIIALSYIRIITVILRIPSVEGRQKAFSTCAAHLSVFLMFYGSVSLMYLRFSATFPPILDTAVALMFAVLAPFFNPIIYSFRNKDMKIAIKKLFCPQKMVNLSVD

SEQ ID NO: 223 - protein, 395 aa, Homo sapiens
MVCQLRSRHMQELLVTTCSLKKQEASTNLKDKTWFKHLGTGGEAALLLKSSTWPMALWSTRGSKMVSWSVIAKIQEIWCEEDERKMVREFLAEFMSTYVMMVFGLGSVAHMVLNKTYGSYLGVNLGFGFGVTMGVHVAGRISGAHMNAAVTFTNCALGRVPWRKFPVHVLGQFLGSFLAAATIYSLFYSKCAAWEWLTRMLQLCLFTITDQENNPALPGTHALVISILVVIIRVSHGINTGYAINPSRDPPPSIFTFIAGWGKQVFSLGMTPLLNQSSPKVDEGAVLGISPLSRPLPLACSDGENWWWVPVVAPLLGASLGGIIYLVFIGSTIPREPLKLEDSVAYEDHGITVLPKMGSHEPMISPLTLISVSLANRSSVHSAPPLHESMALEHF

SEQ ID NO: 224 - protein, 540 aa, Homo sapiens
MLPAPDSNTGSSSENKDADLGRCLTADGLYLYTTNSVGRGVSKLGSGLHGTLRGFVYCRNEELEPGWVAFGSGSLLHRPVSFDNKPHSLFQVIDQNTLQVCQVVPMPANHLPIGSTMSTVHLSSDGTYFYWIWSPASLNEKTPKGHSVFMDIFELVVENGVFVANPLQERTILMRKEGESAKSINEMLLSRLSRYRASPSATLAALTGSTISNTLKEDQAANTSCGLPLKMLRKTPIYTCGTYLVMLVPPPGGSGSSATRSLFGGTSGLSSLKILASSLVYNISDGQFTSRADLIDAAGSSLGRGALVPGLGACYDTVNNMLWTCSNDYIDQWCNPGNQAFHYVCQRLGVSHIITEPKEEAITTNEVINQLLHHVGAMCIHQLNLLATNPNLPITSVLGKQHPIEAHHLSSICDIMEKAMVNGDTCIIRCILVVFQVVFKFFFSPQTERNRDIIRRSGLLLWQLLMAPKDQICPEIQKEVCLAIRLWFQISCTPGETDITNLLKLVLTEGREKQWTLPSYGNVILTILCEQSQNNRFGSG

SEQ ID NO: 225 - protein, 562 aa, Homo sapiens
MTQNKLKLCSKANVYTEVPDGGWGWAVAVSFFFVEVFTYGIIKTFGVFFNDLMDSFNESNSRISWIISICVFVLTFSAPLATVLSNRFGHRLVVMLGGLLVSTGMVAASFSQEVSHMYVAIGIISGLGYCFSFLPTVTILSQYFGKRRSIVTAVASTGECFAVFAFAPAIMALKERIGWRYSLLFVGLLQLNIVIFGALLRPIIIRGPASPKIVIQENRKEAQYMLENEKTRTSIDSIDSGVELTTSPKNVPTHTNLELEPKADMQQVLVKTSPRPSEKKAPLLDFSILKEKSFICYALFGLFATLGFFAPSLYIIPLGISLGIDQDRAAFLLSTMAIAEVFGRIGAGFVLNREPIRKIYIELICVILLTVSLFAFTFATEFWGLMSCSIFFGFMVGTIGGTHIPLLAEDDVVGIEKMSSAAGVYIFIQSIAGLAGPPLAGLLVDQSKIYSRAFYSCAAGMALAAVCLALVRPCKMGLCQHHHSGETKVVSHRGKTLQDIPEDFLEMDLAKNEHRVHVQMEPVQNKKSGKRTYNFPFHVTTHPNQNYFNDYPFPTWKIRRET

SEQ ID NO: 226 - protein, 155 aa, Homo sapiens
MFESKNGPEYASFFPVMGASAAMVFSALGPAYGSTKSGTGISAMSVIRPEQIMKSIIPVVMAGIIAIYGLVVAVLIANSLNDDISLYKSFLQLGAGLSVGLSGLAAGFAIGIVGDAGVRGTAQQPRLFVGMILILIFAEVLGLYGLIVALILSTK

SEQ ID NO: 227 - protein, 327 aa, Homo sapiens
MLGPQVWSSVRQGLSRSLSRNVGVWASGEGKKVDIAGIYPPVTTPFTATAEVDYGKLEENLHKLGTFPFRGFVVQGSNGEFPFLTSSERLEVVSRVRQAMPMNRLLLAGSGCESTQATVEMTVSMAQVGADAAMVVTPCYYRGRMSSAALIHHYTKVADLSPIPVVLYSVPANTGLDLPVDAVVTLSQHPNIVGMKDSGGDVTRIGLIVHKTRKQDFQVLAGSAGFLMASYALGAVGGVCALANVLGAQVCQLERLCCTGQWEDAQKLQHRLIEPNAAVTRRFGIPGLKKIMDWFGYYGGPCRAPLQELSPAEEEALRMDFTSNGWL

SEQ ID NO: 228 - protein, 1070 aa, Homo sapiens
MAANSTSDLHTPGTQLSVADIIVITVYFALNVAVGIWSSCRASRNTVNGYFLAGRDMTWWPIGASLFASSEGSGLFIGLAGSGAAGGLAVAGFEWNATYVLLALAWVFVPIYISSEIVTLPEYIQKRYGGQRIRMYLSVLSLLLSVFTKISLDLYAGALFVHICLGWNFYLSTILTLGITALYTIAGGLAAVIYTDALQTLIMVVGAVILTIKGTALAGRGYPPCCPAVTSSGPGKELTQELRASHTRIGSALDAFDQIGGYGQLEAAYAQAIPSRTIANTTCHLPRTDAMHMFRDPHTGDLPWTGMTFGLTIMATWYWCTDQVLRLRQFGVWDSEGTRMLLGGPAIGHGAGILGQSWAAGIRKQAGYLTSLGLPVVGASHGWASVSGRALDAVSSRAVIVQRSLSARDLNHAKAGSILASYLKMLPMGLIIMPGMISRALFPGMPLRLTLCDMRYSSWNCRSNISTTWPDSTEITFRSVRAADHVKLQQREGALVRHMTLLPPPSPRAPIAAGPQTVATGPWDQEVNGGREQTPVAGVAPGKQPQRQAGVGRGLQVCTQPAQQEAGHGPGQLALVTLYPTWSTLGVEKSDKDPGGGNSSSGYVTAWQEALGLLDSECLAQDSVQSRQVLEVFVDRLNDPCPPATQASEEPAHLEVPQVHAGPLTHVQEVLDVTLIHDDVHGHFPLEAGVQQVLEDVHGLPVVLTTGKDALELQLREEVSDVLPLEHLVEGVPAAGHQGLQRQPLLLAVEELRLGLAGAPVHMVVVQTLHLREGHGAACPGTAAGGAHVYEERHQVSVSRTDDVGCVVPSECLRACGAEVGCSNIAYPKLVMELMPIGLRGLMIAVMLAALMSSLTSIFNSSSTLFTMDIWRRLRPRSGERELLLVGRLVIVALIGVSVAWIPVLQDSNSGQLFIYMQSVTSSLAPPVTAVFVLGVFWRRANEQGAFWGLIAGLVVGATRLVLEFLNPAPPCGEPDTRPAVLGSIHYLHFAVALFALSGAVVVAGSLLTPPPQSVQIENLTWWTLAQDVPLGTKAGDGQTPQKHAFWARVCGFNAILLMCVNIFFYAYFA

SEQ ID NO: 229 - protein, 539 aa, Homo sapiens
MGNAGSMDSQQTDFRAHNVPLKLPMPEPGELEERFAIVLNAMNLPPDKARLLRQYDNEKKWELICDQERFQVKNPPHTYIQKLKGYLDPAVTRKKFRRRVQESTQVLRELEISLRTNHIGWVREFLNEENKGLDVLVEYLSFAQYAVTFDFESVESTVESSVDKSKPWSRSIEDLHRGSNLPSPVGNSVSRSGRHSALRYNTLPSRRTLKNSRLVSKKDDVHVCIMCLRAIMNYQYGFNMVMSHPHAVNEIALSLNNKNPRTKALVLELLAAVCLVRGGHEIILSAFDNFKEVCGEKQRFEKLMEHFRNEDNNIDFMVASMQFINIVVHSVEDMNFRVHLQYEFTKLGLDEYLDKLKHTESDKLQVQIQAYLDNVFDVGALLEDAETKNAALERVEELEENISHLSEKLQDTENEAMSKIVELEKQLMQRNKELDVVREIYKDANTQVHTLRKMVKEKEEAIQRQSTLEKKIHELEKQGTIKIQKKGDGDIAILPVVASGTLSMGSEVVAVVFNSGLAGKSTEFKPRYSYQKCCLISES

SEQ ID NO: 230 - protein, 299 aa, Homo sapiens
MRNDQNNGDMKPFQNFTTIPITQALNYNLSKEGHLEKEPWNAFSHHGPVNVSINGIPCILFWAKRIMIKFKNQTWLDLTDEPFGQKVTVDPDNSNCSEESARLSLKLGDAGNPRSLAIRFILTNYNKLSIQSWFSLRRVEIISNNSIQAVFNPTGVYAPSGYSYRCQRVGSLQQDQALLLPSDTDDGSSLWEVTFIDFQIQGFAIKGGRFTKAQDCASSFSPAFLIGLAMSLILLLVLAYALHMLIYLRYLDQQYDLIASPAHFSQLKARDTAEEKELLRSQGAECYKLRSQQISKIYV

SEQ ID NO: 231 - protein, 944 aa, Homo sapiens
MTLNQFQVQMLRKLEASAFVPLELEDHHANKARREDFCPRKLRQMHLMIDQLMAHSHLRYKGTLSMLQCNVFPGLPPDFLDSEVNLFLVPFMDSEAESENPPRAGTVTLNSFQSLVSKLRSQVMSMARPQLSHTILTEKNCSGLRLLIGFTCDLVVSVAKEGLNQHTLGVPGCQIQGRVKHPVDGGEGGAAEDNHYCLQMAGITGFGEGNPVSWRNGFCVTSKDCKFGNSIYALTYGVGFGFCVNTTCCQGNYQEPTPLAAHLASHTLSEILCPTCPGSYLEPCNSSFYMQCPSGESECVQLDLTSEEGGRNVNVRGCGSRDLCSALDWTHGLSVLPRHWAVEPLQPPPPRRHRSWQPRRCDKESRLDHPAAREAPSTCLFGTSIDGALAPLCWGNAETWKPLVTMSESGHSQPGLYGIERRRRWKEPGSGGPQNLSGPGGRERDYIAPWERERRDASEETSTSVMQKTPIILSKPPAERSKQPPPPTAPAAPPAPAPLEKPIVLMKPREEGKGPVAVTGASTPEGTAPPPPAAPAPPKGEKEGQRPTQPVYQIQNRGMGTAAPAAMDPVVGQAKLLPPERMKHSIKLVDDQMNWCDSAIEYLLDQTDVLVVGVLGLQGTGKSMVMSLLSANTPEEDQRTYVFRAQSAEMKERGGNQTSGIDFFITQERIVFLDTQPILSPSILDHLINNDRKLPPEYNLPHTYVEMQSLQIAAFLFTVCHVVIVVQDWFTDLSLYRLWDLGCKCKSNSHSPQTPRFLQTAEMVKPSTPSPSHESSSSSGSDEGTEYYPHLVFLQNKARREDFCPRKLRQMHLMIDQLMAHSHLRYKGTLSMLQCNVFPGLPPDFLDSEVNLFLVPFMDSEAESENPPRAGPGSSPLFSLLPGYRGHPSFQSLVSKLRSQVMSMARPQLSHTILTEKNWFHYAARIWDGVRKSSALAEYSRLLA

SEQ ID NO: 232 - protein, 366 aa, Homo sapiens
MPAKLQGNGIMTASTFRPQANALNHKSMANLDKYTETFKMGSNSTSTAEIYCNVTNVKFQYSLYATTYILIFIPGLLANSAALWVLCRFISKKNKAIIFMINLSVADLAHVLSLPLRIYYYISHHWPFQRALCLLCFYLKYLNMYASICFLTCISLQRCFFLLKPFRARDWKRRYDVGISAAIWIVVGTACLPFPILRSTDLNNNKSCFADLGYKQMNAVALVGMITVAELAGFVIPVIIIAWCTWKTTISLRQPPMAFQGISERQKALRMVFMCAAVFFICFTPYHINFIFYTMVKETIISSCPVVRIALYFHPFCLCLASLCCLLDPILYYFMASEFRDQLSRHGSSVTRSRLMSKESGSSMIG

SEQ ID NO: 233 - protein, 248 aa, Homo sapiens
MAPKAAKGAKPEPAPAPPPPGAKPEEDKKDGKEPSDKPQKAVQDHKEPSDKPQKAVQPKHEVGTRRGCRRYRWELKDSNKEFWLLGHAEIKIRSLGCLIAAMILLSSLTVHPILRLIITMEISFFSFFILLYSFAIHRYIPFILWPISDLFNDLIACAFLVGAVVFAVRSRRSMNLHYLLAVILIGAAGVFAFIDVCLQRNHFRGKKAKKHMLVPPPGKEKGPQQGKGPEPAKPPEPGKPPGPAKGKK

SEQ ID NO: 234 - protein, 828 aa, Homo sapiens
MLLNSFSFSIMDVSHIILPTIPMAIIYQPPMFSQLLKALQTDVPTPATQLLWPNFNPIHHSQLLHLLKKFLKFQYLSYLIGAKLTRESEKSKEFKSIDIGQIFQMKTAIKKKRGAAKAMSVPSSLSQSAINANSHGGPALSLPLPLHAAHNQLLNAKLQATAVGPKDLRSAMGEGGGPEPGPANAKWLKEGQNQLRRAATAHRDQNRNVTLTLAEEASQEPEMAPLGPKGLIHLYSELELSAHNAANRGLRGPGLIISTQEQGPDEGEEKAAGEAEEEEEDDDDEEEEEDLSSPPGLPEPLESVEAPPRPQALTDGPREHSKSASLLFGMRNSAASDEDSSWATLSQGSPSYGSPEDTDSFWNPNAFETDSDLPAGWMRVQDTSGTYYWHIPTGTTQWEPPGRASPSQGSSPQEESQLTWTGFAHGEGFEDGEFWKDEPSDEAPMELGLKEPEEGTLTFPAQSLSPEPLPQEEEKLPPRNTNPGIKCFAVRSLGWVEMTEEELAPGRSSVAVNNCIRQLSYHKNNLHDPMSGGWGEGKDLLLQLEDETLKLVEPQSQALLHAQPIISIRVWGVGRDSGRERDFAYVARDKLTQMLKCHVFRCEAPAKNIATSLHEICSKIMAERRNARCLVNGLSLDHSKLVDVPFQVEFPAPKNELVQKFQVYYLGNVPVAKPVGVDVINGALESVLSSSSREQWTPSHVSVAPATLTILHQQTEAVLGECRVRFLSFLAVGRDVHTFAFIMAAGPASFCCHMFWCEPNAASLSEAVQAACMLRYQKCLDARSQASTSCLPAPPAESVARRVGWTVRRGVQSLWGSLKPKRLGAHTP

SEQ ID NO: 235 - protein, 170 aa, Homo sapiens
MDVNIAPLRAWDDFFPGSDRFARPDFRDISKWNNRVVSNLLYYQTNYLVVAAMMISIVGFLSPFNMILGGIVVVLVFTGFVWAAHNKDVLRRMKKRYPTTFVMVVMLASYFLISMFGGVMVFVFGITFPLLLMFIHASLRLRNLKNKLENLEQQEEGINRLTDYISKVKE

SEQ ID NO: 236 - protein, 185 aa, Homo sapiens
MAKEEPQSISRDLQELQKKLSLLIDSFQNNSKLPQHSRISLDSDDGVSRLGSAGSKVVAFMKSPVGQYLDSHPFLAFTLLVFIVMSAVPVGFFLLIVVLTTLAALLGVIILEGLVISVGGFSLLCILCGLGFVSLAMSGMMIASYVVVSSLISCWFSPRPLTQQNTSCDFLPAMKSADFEGLYQE

SEQ ID NO: 237 - protein, 607 aa, Homo sapiens
MGSAFVILSDLELNRTTEHILKLEDPNSLEDDMGVIVLNLNLVVKQGDFKRHRWSNRKRLSASKSSLIRNLRLSESLKKNQLWNGIISITLLEGKNVSGGSMTEMFVQLKLGDQRYKSKTLCKSANPQWQEQFDFHYFSDRMGILDIEVWGKDNKKHEERLGTCKVDISALPLKQANCLELPLDSCLGALLMLVTLTPCAGVSVSDLCVCPLADLSERKQITQRYCLQNSLKDVKDVGILQVKVLKAADLLAADFSGKSDPFCLLELGNDRLQTHTVYKNLNPEWNKVFTFPIKDIHDVLEVTVFDEDGDKPPDFLGKVAIPLLSIRDGQPNCYVLKNKDLEQAFKGVIYLEMDLIYNPVKASIRTFTPREKRFVEDSRKLSKKILSRDVDRVKRITMAIWNTMQFLKSCFQWESTLRSTIAFAVFLITVWNFELYMIPLALLLIFVYNFIRPVKGKVSSIQDSQESTDIDDEEDEDDKESEKKGLIERIYMVQDIVSTVQNVLEEIASFGERIKNTFNWTVPFLSSLACLILAAATIILYFIPLRYIILIWGINKFTKKLRNPYSIDNNELLDFLSRVPSDVQKVQYAELKLCSSHSPLRKKRSAL

SEQ ID NO: 238 - protein, 484 aa, Homo sapiens
MPGSCRRGAGAAVAATAPGIPRRAAAAGGGSAGSWGGGGRGVAGGGGRGPGGGRVTWLLGEPVLWLGCRADELLSWKRPLRSLLGFVAANLLFWFLALTPWRVYHLISVMILGRVIMQIIKDMVLSRTRGAQLWRSLSESWEVINSKPDERPRLSHCIAESWMNFSIFLQEMSLFKQQSPGKFCLLVCSVCTFFTILGSYIPGVILSYLLLLCAFLCPLFKCNDIGQKIYSKIKSVLLKLDFGIGEYINQKKRERSEADKEKSHKDDSELDFSALCPKISLTVAAKELSVSDTDVSEVSWTDNGTFNLSEGYTPQTDTSDDLDRPSEEVFSRDLSDFPSLENGMGTNDEDELSLGLPTELKRKKEQLDSGHRPSKETQSAAGLTLPLNSDQTFHLMSNLAGDVITAAVTAAIKDQLEGVQQALSQAAPIPEEDTDTEEGDDFELLDQSELDQIESELGLTQDQEAEAQQNKKSSGFLSNLLGGH

SEQ ID NO: 239 - protein, 484 aa, Homo sapiens
MPGSCRRGAGAAVAATAPGIPRRAAAAGGGSAGSWGGGGRGVAGGGGRGPGGGRGNLAARGAGAVAGLPRRRAAELEEAAAEPARLRRCQPAVLVLALTPWRVYHLISVMILGRVIMQIIKDMVLSRTRGAQLWRSLSESWEVINSKPDERPRLSHCIAESWMNFSIFLQEMSLFKQQSPGKFCLLVCSVCTFFTILGSYIPGVILSYLLLLCAFLCPLFKCNDIGQKIYSKIKSVLLKLDFGIGEYINQKKRERSEADKEKSHKDDSELDFSALCPKISLTVAAKELSVSDTDVSEVSWTDNGTFNLSEGYTPQTDTSDDLDRPSEEVFSRDLSDFPSLENGMGTNDEDELSLGLPTELKRKKEQLDSGHRPSKETQSAAGLTLPLNSDQTFHLMSNLAGDVITAAVTAAIKDQLEGVQQALSQAAPIPEEDTDTEEGDDFELLDQSELDQIESELGLTQDQEAEAQQNKKSSGFLSNLLGGH

SEQ ID NO: 240 - protein, 124 aa, Homo sapiens
MHKEEHGVAVLGAPPSTILPRSTVINIHSETSVPDHVDWSLFNTLFLNCCCLGFIAFAYSVKSRDRKMVGDETGAQAYAYTDKCLNIWALNLGILMTIGFILLLVFGSVTDYHIMLQIIQELSY

SEQ ID NO: 241 - protein, 436 aa, Homo sapiens
MDSGTVEREGGGRKKTERAIPSGATKTISPPVTTSGLGHVPATSPCQSHATGCTEAALLKELPTHLHYLDGEMERHSKHLCSSLGKVQDAFFSLAMALPLLLSPSCFASSQSLSSRMNSENLTRAAVAPAEFVLLGITNRWDLRVALFLTCLPVYLVSLLGNMGMALLIRMDARLHTPMYFFLANLSLLDACYSSAIGPKMLVDLLLPRATIPYTACALQMFVFAGLADTECCLLAAMAYDRYVAIRNPLLYTTAMSQRLCLALLGASGLGGAVSAFVHTTLTFRLSFCRSRKINSFFCDIPPLLAISCSDTSLNELLLFAICGFIQTATVLAITVSYGFIAGAVIHMRSVEGSRRAASTGGSHLTAVAMMYGTLIFMYLRPSSSYALDTDKMASVFYTLVIPSLNPLIYSLRNKEVKEALRQTWSRFHCPGQGSQ

SEQ ID NO: 242 - protein, 1090 aa, Homo sapiens
MMKFRFRRQGADPQREKLKQELFAFNKTVEHGFPNQPSALAFDPELRIMAIGTRSGAVKMYPLQDSYGAPGVEFTGLHRDAATVTQMHFLTGQGRLLSLLDDSSLHLWEIVHHNGCAHLEEALSFQLPSRPGFDGASAPLSLTRVTVVLLVAAGDIAALGTEGSSVFFLDVTTLTLLEGQTLAPGEVLRSVPDDYRCGKALGPVESLQGHLRDPTKILIGYSRGLLVIWNQASQCVDHIFLGNQQLESLCWGRDSSTVVSSHSDGSYAVWSVDAGSFPTLQPTVATTPYGPFPCKAINKILWRNCESGGHFIIFSGGMPRASYGDRHCVSVLRAETLVTLDFTSRIIDFFTVHSTRPEDEFDDPQALAVLLEEELVVLDLQTPGWPAVPAPYLAPLHSSAITCSAHVASVPAKLWARIVSAGEQQSPQPVSSALSWPITGGRNLAQEPSQRGLLLTGHEDGTVRFWDASGVALRPLYKLSTAGLFQTDCEHADSLAQAAEDDWPPFRKVGCFDPYSDDPRLGVQKVALCKYTAQMVVAGTAGQVLVLELSDVPVEQAVSVAIIDLLQDREGFTWKGHERLSPRTGPLPWPAGFQPRVLVQCLPPAAVTAVTLHTEWSLVAFGTSHGFGLFDYQRKSPVLARCTLHPNDSLAMEGPLSRVKSLKKSLRQSFRRIRKSRVSGKKRAANASSKLQEANAQLAEQACPHDVEMTPVQRRIEPRSADDSLSGVVRCLYFADTFLRDGAHHGPTMWAGTNSGSVFAYALEVPAAAVGGEKRPEQAVEAVLGKEVQLMHRAPVVAIAVLDGRGRPLPEPYEASRDLAQAPDMQGGHAVLIASEEQFKVFTLPKVSAKTKFKLTAHEGCRVRKVALATFASVACEDYAETCLACLTNLGDVHVFSVPGLRPQVHYSCIRKEDISGIASCVFTRHGQGFYLISPSEFERFSLSARNITEPLCSLDINWPRDATQASYRIRESPKLSQANGTPSILLAPQSLDGSPDPAHSMGPGPQVQRVLRVLVGADDLLPVDTPEPPEAALSPMSIDSATSADTTLDTTGDVTVEDVKDFLGSSEESEKNLRNLAEDEAHACAILIK

SEQ ID NO: 243 - protein, 227 aa, Homo sapiens
MVLLSILQTVKDQLSSYGYWQDSVSHGALDKGLSSSLTVAHSQFLEMCLFSVAVFFIEACKPQGPRESQQDGSHASLQSITPVAFTASGLVGEASYWYRSTLPSAVAGRSQFNARQTTFINTEVTRYFIQEHSHWHQVSAPLGWSSQRKEQAAIFAVLQPALVMPPARAQNWAEAEMDELTEVGFRRWVITNFTELKEHLLTQCKEAKNPDKTLNKLLTRISSLVGT

SEQ ID NO: 244 - protein, 665 aa, Homo sapiens
MAGHTQQPSGRGNPRPAPSPSPVPGTVPGASERVALKKEIGLLSACTIIIGHREAAWLLSPQKGALVVVVVVVVVVVVVVVMVEVVVVGVEKANSTITLLFQDRLYALGVLQDPKGSPNYNFGDLSVLGTLIHLFNHYILNGVRHWLTCQRHHGGVKTDKIHLLVWESRNKMNKLNALVQISGEVTGFMCTDGNIIGSGIFISPKGVLEHSGSVGLALFVWVLGGGVTALGSLCYAELGVAIPKSGGDYAYVTEIFGGLAGFLLLWSAVLIMYPTSLAVISMTFSNYVLQPVFPNCIPPTTASRVLSMACLMLLTWVNSSSVRWATRIQDMFTGGKLLALSLIIGVGLLQIFQGHFEELRPSNAFAFWMTPSVGHLALAFLQGSFAFSGWNFLNYVTEEMVDARKNLPRAIFISIPLVTFVYTFTNIAYFTAMSPQELLSSNAVAVTFGEKLLGYFSWVMPVSVALSTFGGINGYLFTYSRLCFSGAREGHLPSLLAMIHVRHCTPIPALLVCCGATAVIMLVGDTYTLINYVSFINYLCYGVTILGLLLLRWRRPALHRPIKVNLLIPVAYLVFWAFLLVFSFISEPMVCGVGVIIILTGVPIFFLGVFWRSKPKCVHRLTESMTHWGQELCFVVYPQDAPEEEENGPCPPSLLPATDKPSKPQ

SEQ ID NO: 245 - protein, 459 aa, Homo sapiens
MDVKERRPYCSLTKSRREKERRYTNSSADNEECRVPTQKSYSSSETLKAFDHDSSRLLYGNRVKDLVHREADEFTRQGQNFTLRQLGVCEPATRRGLAFCAEMGLPHRGYSISAGSDADTENEAVMSPEHAMRLWGRGVKSGRSSCLSSRSNSALTLTDTEHENKSDSENEQPASNQGQSTLQPLPPSHKQHSAQHHPSITSLNRNSLTNRRNQSPAPPAALPAELQTTPESVQLQDSWVLGSNVPLESRHFLFKTGTGTTPLFSTATPGYTMASGSVYSPPTRPLPRNTLSRSAFKFKKSSKYCSWKCTALCAVGVSVLLAILLSYFIAMHLFGLNWQLQQTENDTFENGKVNSDTMPTNTVSLPSGDNGKLGGFTQENNTIDSGELDIGRRAIQEIPPGIFWRSQLFIDQPQFLKFNISLQKDALIGVYGRKKLPPSHTQVRLGFLINKIKTASCIF

SEQ ID NO: 246 - protein, 151 aa, Homo sapiens
MAAQKDQQRDAEAEGLSGTTLLPKLIPSGAGREWLERRRATIRPWSTFVDQQRFSRPRNLGELCQRLVRNVEYYQSNYVFVFLGLILYCVVTSPMLLVALAVFFGACYILYLRTLESKLVLFGATLVVIGSHAAFHQIEAVDGEELQMEPV

SEQ ID NO: 247 - protein, 330 aa, Homo sapiens
MVQCFGHISGGHINPAVTVAMVCTRKISIAKSVFYIAAQCLGAIIGAGILYLVTPPTGSATVDLCCTKAVSLLPGEPPQKVPTGVCGPLPAGTTGLLLGKSSLGLKGVQIHTGVIDSDYNGEIQIVVSTSVPWKAEPGEHIAQFLIVPFVEMGKSEIKRTGGFGSTNKQGKAAYWVNQITDKHPTCEITIQGKKCKGLVDTGADISIISLQHWLSVWPIQPAQFNIVGVGKAPEVYQSSYILHREGPDGQPGTIQPIITSVPINLWGRDLLQQWGTQVLIPEQLYSPQNQHMMHEMGYVPGMGLEKNLQGLKEPLQAERQNSRQRLGYHF

SEQ ID NO: 248 - protein, 186 aa, Homo sapiens
MASSAASSEHFEKLHEIFRGLHEDLSFRNPMMSKLRNYRKDLAKLHREVRSTPLTATPGGRGDMKYGIYAVENEHMNRLQSQRAMLLQGTESLNRATQSIERSHRIATETDQIGSEIIEELGEQRDQLERTKSRLVNTSENLSKSRKILRSMSRKVTTNKLLLSIIILLELAILGGLVYYKFFRSH

SEQ ID NO: 249 - DNA, 438 bp, Homo sapiens
aagtgagcttcctctcctccttcttcctcagcctgccctatggtgtggcagtgggtgtcgccttctccgtcctggtcgtggtcttccagactcagtttcgaaatggctatgcactggcccaggtcatggacactgacatttatgtgaatcccaagacctataatagggcccaggatatccaggggattaaaatcatcacgtactgctcccctctctactttgccaactcagagatcttcaggcaaaaggtcatcgccaagacaggcatggacccccagaaagtattactagccaagcaaaaatacctcaagaagcaggagaagcggagaatgaggcccacacaacagaggaggtctctattcatgaaaaccaagactgtctccctgcaggagctgcagcaggactttgagaatgcgccccccaccgaccccatgtatt

SEQ ID NO: 250 - DNA, 1696 bp, Homo sapiens
ttttttttttttgcaggaccacaaaatggaactttattcagtcacagacactgaccctccaatagccccagaagcaagagcctagggcccagcaatccatacccagtccttggagttgggcagggtaggacgctggccaagggccagtgctgtctcttgcttacagcctgaggactacgggagcagcagctgtggcctggccgctcccaatgctgggggcttggcttggtgccccatccccttcctgactgagctctatgaaggactcttaaaaaaataaaataaaatgcaagcaaagtgctttgaaagaagggaggacaccctattcctgctaaggggtagaggaagaaggtgaaggcggctaggtgcccataagagaaggctggcacaatcttcattcccgccagtgtgatttcagtctcaaaagatgagtatttggctgagaaatggaaggatactccaggctccctacggagttgtgctggggccatgctgagctgcccttgcaggcagccctgggtgctgggggcagacatgcaggacactgggaagagtcagaaccacaggtgggagggaatctcagagcccaggctccccactgagcttggccagcagctttgaactccttcagaggaccctttcattttcttcctatgtccttatcgtccatacatcccaaatactaggaagctgaagaagacggtgactcccaccagggagacagtggcaggtgctgtgaagaattggcggtaattgattcggaagtaccagaccacacccaacagcaccacaaagacaggcaccatgaggctgcccacattgacaccaaggctgggtggctcagtggccgagggggccaaggaggctgaggggcctggaacagctgaccctgggggtgagcggtggcagtgaatcacacagttgtcggtaatgttcagagaacgcagtgtgcgggctgggtcttgtagcaggcggccctggtagatcagtttcatctggctttcttgtccagggaagtatttgctcttcagggcacccacggtatcctctggcctagccacagccagctcctcggtatcattgaggaatttgagccgcacagtgatgaggccagggctgggagggaggcaggtgctatcctcagatctcaggggggcctctggactgctgctgcctgcacctgcttgtcttttgggcaggccttggatgtcaaggagatgctcaaggctgggctcaacaccacccccagctccagcctccccagtggagtctccccgaccttcacccgcctcttcagccttctcatcattaccctctgatggatgggggagttcagttggctcggggttgccttggcctgccaccaggtggtccacatgccccaggtggaggacggatgtgtcgcctgctgacacaatagcgcccaggagctggttgctaccgctgtctgctacgtaggtagagagccaagctaggaccaaggctagaatcagcaccaccacacctgccaccaccatcacctcattacccacaccctcaatgagggtgacatcagagagctccatggcctggctgctggcagggtccacgctgaaaagaccagactaaatgttttgacctcgccaggacggcccctggactcgtctttccgtaggggtcgggaaaagggctggcaatctgcgattctgttcagggt

SEQ ID NO: 251 - DNA, 245 bp, Homo sapiens
ggtgaggatgaatgtaaaagtgtagagcaagctttcagacaacttcaaagtttgtttttggcgcttccgtttgtaagcaatcaagatggtgagagacgctatcccaaagaagaaagtctgtaggaaccagagtagctgagcccgaccacttgtgatgcctttatgcttgcacaatactatggcatacaaggactctcccacatgaatcagccaggcaagccaatacccattgcacaggagggtgt

SEQ ID NO: 252 - DNA, 1380 bp, Homo sapiens
  misc_feature (1)...(1380): n = a,t,c or g
caaaacaaaaaacaatatttccatacctttcctctaatcccaaggaaacctaaagaacttgattaaaaagccgtggccaagagttcgaagtgaaagtcagccctttagctattatttattgctttattagagcagagggaagtgacactcattgccttcacagagctctgcagaaatatatgcacagagtggtcaatgaccaacatctgagtaagtcttccaaattatcacattaaaataacctttcaaatttgagtgcctctcctttgcaaacaactgcaacctcataatgaataattttatatattatcaaaaagaaccagaagcccaggtgcttttttccccaaaatccacttactaaggacttgagtgaaaatccactctaagcagatcactgttactatttccctttcaaaacagttggaaatcctaaggtacgggtactaagaagatagcaatatccttcttaagctggtaagaatctagccccacagggacaatttggcaatcctgtttctggaagccaggactccagagatttgtcttagtgatggacagatactcctctaaccttaaggcatgagggctgtcaaaacaaggctctgaatagtgccttcctgctcatcaatgtcatcacaatgaaggagagaacaggttttcgttttcctgaagagtggtcagtaggagtgcagtggtttggcatagatcggctccagaacataatggattaaaaccaagaagaggcctccaaggaagatggcactaaggaaagccagcaggacatagcggccaatgaaaaagtcatccacaatcttaacttccacttctggggctgggaattcaccagctcgcgggaaaagcaacagaactgatgtgatgatcacagcaccgaagaataaaaaaatgacagagaacctcgccgccccggaggctctggacagcagcacacacagcagcagcactgccacccagagcagggctaagatgaacacgcccgcaccgactccgagcacagtgccagccatcccgcggggaggcagcggcggccccccgccctgcgcgccgcacgatcgagtgtcctctgtgctccagtgcgacacacaggcaatggatcacaagacagaaagttcccactctgttgtcgagttcttattcaagaggacgaaaactcccagtccctttcatccagctgtcagagaaaataggaataaatggnctgatccctgcacaggtaactatctaagacaaatgtggattcctcagagggtaatgtggcctaagtgctgctgctggagggagatatctcacccatcccccgattctcacactgactcaagccctctgcccccttcaaaaggatccactctcccccaggctcta

SEQ ID NO: 253 - DNA, 522 bp, Homo sapiens
attttccacgtctcttcaacctccgctcaatttacttacaatggaacaggattcgctccattagccaaggtttgacatggacttggagttccttacacaacttggatttatcagggaatgacatccaaggaattgagccgggcacatttaaatgcctccccaatttacaaaaattgaatttggattccaacaagctcaccaatatctcacaggaaactgtcaatgcgtggatatcattaatatccatcacattgtctggaaatatgtgggaatgcagtcggagcatttgtcctttattttattggcttaagaatttcaaaggaaataaggaaagcaccatgatatgtgcgggacctaagcacatccagggtgaaaaggttagtgatgcagtggaaacatataatatctgttctgaagtccaggtggtcaacacagaaagatcacacctggtgccccaaactccccagaaacctctgattatccctagacctaccatcttcaaacctatcacaccccatccac

SEQ ID NO: 254 - DNA, 681 bp, Homo sapiens
acgcaattcccgggtcgacgatttcgtggcggggccgccgtcgaggctggcgccagatttcgattggctgtgggtcctgcagcttcagagaaaggaggccttctgtcactcgtcactagctcgctcgctcactgggggaggagcccgcctgaggaatccgtgtgcctgggatgccaagagccagagaatggatcttctccgagtggggacattgctgacaatcccggcttcccgaggcggctaagaacaggcagtttgtgtcggctggctgcagatacccagaggcacaaagagaccgaagccacccggagggacccacggacggacagatggtaggcgcgaacccgagaggaccggcggaggctgagcaccgagagccgccaaggaagagaaactaaccacagccaagttaccccgccggctttccttcgctgcgctaaggaatgaaacccttccagctcgatctgctcttcgtctgcttcttcctcttcagtcaagagctgggcctccagaagagaggatgctgtctggtgctgggctacatggccaaggacaagtttcggagaatgaatgaaggccaagtctattccttcagccagcagccccaggaccaggtggtggtgttcggggacagccagtgacgctcctttgcgcgattccccgaaaactaccgcttcgctc

SEQ ID NO: 255 - DNA, 420 bp, Homo sapiens
ccaaaaatgaaagacagactactgatatttcggttcacgtttgttgccaaatcttgaaacgtgggtcccactatagcaacactcaatcccagccccaggaaggaggcacacagcatcaaggtggtgaaccaccgcagcttgctcccggtcccaccgctctgccaggagaccaccaccacctccggctccggctcattctccgccggggcctccgcctgcaggagccgctgccccgcagccgggggcccggccccacggagctccacctctaactccagctcggcggctccggagaagtcgtcttgctgccgccgcgcttctcagcagaacttctggagctccgagaagagcactggccccgaccccaggcacgggtgtccctccgggcgccacctcccagcggaccgcccggaaacgaaa

SEQ ID NO: 256 - DNA, 2575 bp, Homo sapiens
ttttttttttgttttttgttcctattgttaccctctttattccaaaacaattacacatttcaacttttcaaaagcaacatctgggtaagttaggaatattcacagcttcttacacagtgtcagagaaagagactatctgagctcaccaggtatctgctgtgtgttggggaaactgaaaaacaagcaaaagtataactacaatctggacttttttcttttttaaataaagttttttttttccatttttcttctcatactgtgaattgttcttgactccttttcttgacattcagttttcagaatttccatctttcttctggaactaatgtgctgttctcttgactgcctgctgggccagcatccgattgccagccagaaacgtcacactgcccaagatggccaggtacttcaaggtctggaacatgttgagctgagtccagtagacatacatgagtcccagcatagcagcatgtcccaggtgaaatataatcgtgctaggagcaaaagtgaagttggagacattggcaccaatccggatccacagagcgaagagcagaagcaacggcgagaggatcagggcagtgaatgtattggacaccacggtggggggcctcttctcaggctcgcggaacaggtgctgaatttcctgttttggagtgaaaaggttctgggacaagacagtcgagggagcttcttcctcagggaacttgatgaccacatcagccacattccagaggattgggttcttcaaagtggcatctccaatgattaaagtagaaagtgtaggtgccagagcgggaagtcaaattcaatcctttcctttcagaggtatccagttcaaacttgtacacgttcttgttgtctggctcggcaacaaacaccacttccctggccagtcttctggttatggagtcggacaaatgtctggtgaggagtgagttcagcaccagtgttcacacctacccagctggaagaacaaggcgaagttctggtggctgtctgcgatgaatgtgcccttggctttggcctgggtatgtcacccgggtagtttgggggtgcaatgctctgatccttatcccacggtggaaagatcaacatttgtgatgccaacttcagtgggaggatcttggactctgagctctacggtatttggaaatataccggttgtcacctttcaactttcgaccaaggaagtcattaataaccacttggaaaatttgacggttcatgaaatttagttcaaaaacaatccctacaaggggtgaaggatgtcttctggaggacagtggctcttggaagcaacagatttagcatgttctagtttaacagtggcctgagtcagaggctgagacagaacattggtgacttgcaaccgcaagatagcctgttcatgagtgtcggaagcagagccctcaggcacaaccacaactggcacgtggtagcgattatgcgagagcacagcagctgcagaggcccacgctgaaggcttcggagagggacttcaaagttcttcttgctgaaagatcgcggttcatcagctggatgacctgatccttccttaatggatggcttcagtccccacaatgatccattgagctttgtaggtggcagccacaaactaacgctgttgtttccagtccttcttcaaacttggagatacacgcccccgagttcatccaggcgagcaacaaggtcctcaatctcctccacgatgctcctcaggtcagcctgctgggacaggtgggatgctgtctgcagagcctggactgttgccagcacagtctcctccttgctgagacgagcagtaagggcactgagtgcttcttgggatgccaagggaaggcccaaagcccactttagagctgccaacttgcatggtaagatctggggtaaacagatgaagtccctcaactgaacagctgcccaaaagccagatctttggtcctcatttgaaaatagagatcttcacattcctgagagggccttggctggccctgggccagccgtagaagagggaatcccacattgcctgggatcaaggttagatcttgatgtaggtacatgctttctttgcactctggcacctgagcacccaaggctgctgagtcccacgattggagtagaaggcagattccaaatttgtgaaagggcgatccagcgaggcttttagtctctccacgtcatgcttggtgaggtagtgagtgggcgtcagagcccaaggtgctggctatgattgtcatgggccaacatggaagacacgtgcttgaaacccggcggcgccattcctccgatgcacggtcccgccggagtccgagccgcgggctgacttccgctcgggaaagtggctccaagagcccgccacaggggacgccagggactcgcggcaggctctgcgggccaggatgagttctaagcacaggtcagtgtccgcggccccgctgagcttcgacgcttccagcagccgcggccgggatcccagtcctcccgctcacagggccttgcagttcccgaggacagacccgcctctcccccgcgcccaggcccacttggaaccgaccgtctcgcaacgctggaa

SEQ ID NO: 257 - DNA, 2081 bp, Homo sapiens
tttcttgtagctcactcgagcctccacctaccaggttcaagccattctcatgtctcattcttttaagtggctgggattacaggtgcacgccacagtgcccagctaatttttatatttttagtagagacagggtttcaccatgttggccaggctgttctcaaactcctggcctcaagtgatccgcccacctcggcctcccaaagtgctgggattacaggtgttagccaccatgcctggctgctaatttttaattttttgtagagacagggtctccctgtgttgcccagactgttctcaaactcctgggctcaagcaatcctcccacctcagcctcccaaagtgctggaattacagtcatgagccatcatgcccagccaggatatggacttcttgactagtaggaagaaagtgggctggacacactggctcacacttgtgatcccagcactttgggagaccgaggtgggaggagatcttgaggcccagagtttgagaccggcttgtgcaacatagtgatgtagcaggacgagccacagacaaaacctctcagacactgagttgtagaaggaagggctttattcagctgggagcatcggcaaactactgccttaaaatccgagctccccaaatgcacaatttctgtcccttttaagggctcacaacactaaagatttcacatgaaagggtcgtgattgatttgagcaagcaggcggtacatgacaggggctgcatgcaccagtggtcagagagaaacagaacagggcagggagtttcacaatgttcttctatacaatgtctggaatctatgaataacatcagtttctaagttatgagttgatttttaactactgggtttaggccagacaggcccaggcctgctttcaggcctggtgccgggctgcctgtctttggttttacttccttgtcactttttcttaaaagaggtactgagtataaaacaatataaaacaatataaaacaatatgagagggtctctctctcttccctcatttcccccctttgagactctcagtttttattagtgggagttctcactcttatttttgctacttatgtattttcgtgcaatagattgatagtgatttatatagtatgcttgtgctgaagcattttggtgaactaaggttaagcgacgaagttttttatcatttggagaaatacaggtatcagacaagggagcagtaagcaggttcctattactattattactcttattataagagttttaaatccacctattgctgggaaccaatttccaaacatggctcccagattgagtccgtgccacacttgcacaggtgcatgtgccagttttgttatatctttaactatatcctcaactacttgcccctgatcatctatgtgtagacaataattagtaaggtcaaatttttcacaaactcctccttcagctgctagcaagtaatcaagagctagtctattttgatagatagcatttctcatcagagtctcttgccaggcaagaacagtcaaggcttgagtggttttattagtaataatttctaaaactgcttgtaaccatatgattcggttgagcatgtagatgggggttccatatccccatgagacatcttgtgaccaagtggcaggtccatagtattgtaagattttttcagggggccattcatcgtctttccaatcacctatggctatgcttcatttttcacaggaagcacagactgggaagcccagaagtttacctgtttttatgggcactaagaagaaagatggcttaatggtgccaattacacagctacctgtccactgatcaggcagcttagcataagctctgtgtccacatacccagtataacccagtgggggccgtccagtcccagtgcaattctgggtgggcccaaacagtctgcaactttggaaatttactgaatggatttttttctgtgtaattggaactccaccatgtaactgtttttgtggtaccattatacagcttttgcccaagacaactaagctgccctacaggatgagtaaatccttttccttctctagctatgcaatactgtccaataataagacttt

SEQ ID NO: 258 - DNA, 919 bp, Homo sapiens
ggaacatggagcgggggccggtggtgggggcaggactgggggccggggcccgtatccaggcactgctgggctgcctgctcaaggtgctgctctgggtggcctctgccttgctgtactttggaagcgaacaggccgcccgccttctgggcagcccctgcttacggcgcctctaccatgcctggctggcagcagtggtcatctttgggccgcttctgcagttccatgtcaaccctcggactatcttcgccagccacggcaacttcttcaacataaaatttgtgaattcagcctggggctggacatgcactttcttagggggctttgtgttgctggtggtgttcctggctacacggcgcgtggcagtaactgccagacacctgagccgactggtagtaggggcagccgtgtggcggggagccggccgggccttcctgctcatcgaggacctgactggctcctgcttcgagccactgccccagggtctgctgctccacgagctgcctgaccgccgcagctgcctggcagccggccaccagtggcgaggctacaccgtctcctcccacaccttcctgctcaccttttgctgcctgctcatggcagaggaagcagctgtgttcgccaagtacctggcccatgggcttcctgccggcgccccactgcgccttgtcttcctgctgaacgtgctgctgctgggcctctggaacttcttgctgctctgtaccgtcatctatttccaccagtacactcacaaggtggtgggcgccgcagtgggcacctttgcctggtacctcacctatggcagctggtatcatcagccctggtctccagggagcccaggccatgggctcttcccccgtccccactccagccgcaagcataactgaaagaaataaaaaccatcgggcctgaaaaaaaaaaa

SEQ ID NO: 259 - DNA, 669 bp, Homo sapiens
  misc_feature (1)...(669): n = a,t,c or g
gattacgccaagcttggcacgaggggcagcgcctggcccgggcgcgcaaagctgctcttctcgcactcggggctctggcgcatctgcgaagtgctgcaccgtgcagtcattgtggtcctgcccctgagcctggtccttctcgtgtgtggctggatctgcggcctgctcagctccctggcccagagcgtgtctctgctgcttttcaccggctgctacttcctgctggggagtgtcctgacactggcgggggtcagcatctacatcagctactcgcacctggcctttgcggagacggtgcagcagtatggcccgcagcacatgcagggcgtccgcgtcagcttcggctgggccatgggcctggcctggggctcctgtgccttggaggcattcagcggaaccctcctgctctcagctgcctggaccctcagcctgagccccccaatctgtggtcatctgagtccccagcaggtgggagggagagggggagactgaggcccagagcggcagagggacccacccagatcgcctggcgccagagagatgccgtctcaggccaaggcctccctggcctctgttctgtccactctccccgaagggcaggcttggtggagaagaggctgatgagagggcccgagagccccttcgatttgcannnnnnnnnnncaaggg

SEQ ID NO: 260 - DNA, 442 bp, Homo sapiens
accgtaccggccggaattcccgggatcagctgctggggttgccaccattctcaggaccctcgccatgaaagcccttatgctgctcaccctgtctgttctgctgtgctgggtctcagctgacattcgctgtcactcctgctacaaggtccctgtgctgggctgtgtggaccggcagtcctgccgcctggagccaggacagcaatgcctgacaacacatgcataccttggtaagatgtgggttttctccaatctgcgctgtggcacaccagaagagccctgtcaggaggccttcaaccaaaccaaccgcaagctgggtctgacatataacaccacctgctgcaacaaggacaactgcaacagcgcaggaccccggcccactccagccctgggccttgtcttccttacctccttggctggccttggcctctggctgctgcactga

SEQ ID NO: 261 - DNA, 1234 bp, Homo sapiens
atgaatttgggaaccgatttgatgtcaacaactgctccatctgctaccactgggtcacctccaggccgcaggagcctgcagtcttctcggccgattacagaggctgccacgtgctggagaaggatgggcgtttccacctgagggtgttcatggaggctgtgctgcccaatggtcgtgtggatgtggcacaagacgctactctgatctgtcccaaacctgacccctcccggactctggactcccagctggcaccacccgccatgttctctgtctcaatcccacaaaccctttccttcctccccacctctggccatacctcccaaggctctggccatgcctttcccagcccactggacccagggcacagctctgtccacccaacccctgctttaccatcccctggacctggacctaccctcgccaccctggctcaaccccactggggcaccttggaacactgggatgtgaacaaacgagattacataggtacccacctgagccaggagcagtgccaggtggcctcagggcacctcccctgcatcgtgagaagaacttcaaaagaagcctgtcagcaggctggctgctgctatgacaacaccagagaggttccctgttactatggcaacacagctactgtccagtgcttcagagatggctacttcgtcctcgtggtgtcccaagaaatggccttgacacacaggatcacactggccaacatccacctggcctatgcccccaccagctgctccccaacacagcacacggaagctttcgtggtcttctacttccctctcacccactgtggaaccacaatgcaggtggctggcgaccagctcatctatgagaactggctggtgtctggcatccacatccaaaaggggccacagggttccatcacgcgggacagcaccttccagcttcatgtgcgctgtgtcttcaacgccagtggcttcctgcccattcaggcatccattttcccacccccatcgcctgctcctatgacccagcccggccccctgcggcttgagctgcggattgccaaagacgagaccttcagctcgtactatggggaggatgactatcccatcgtgaggctgctccgagaaccagtccatgtggaggtccggcttctgcagaggacagaccccaacctggtcctgctgctgcaccagtgctggggcgctcccagtgccaaccccttccagcagccccagtggcccatcctgtcagacgg

SEQ ID NO: 262 - DNA, 665 bp, Homo sapiens
gcggccgccgcctccaactgggggctgatcacgaacatcgtgaacagcatcgtaggggtcagtgtcctcaccatgcccttctgcttcaaacagtgcggcatcgtcctgggggcgctgctcttggtcttctgctcatggatgacgcaccagtcgtgcatgttcttggtgaagtcggccagcctgagcaagcggaggacctacgccggcctggcattccacgcctacgggaaggcaggcaagatgctggtggagaccagcatgatcgggctgatgctgggcacctgcatcgccttctacgtcgtgatcggcgacttggggtccaacttctttgcccggctgttcgggtttcaggtgggcggcaccttccgcatgttcctgctgttcgccgtgtcgctgtgcatcgtgctcccgctcagcctgcagcggaacatgatggcctccatccagtccttcagcgccatggccctcctcttctacaccgtgttcatgttcgtgatcgtgctctcctctctcaagcacggcctcttcagtgggcagtggctgcggcgggtcagctacgtccgctgggagggcgtcttccgctgcatccccatcttcggcatgtccttcgcctgccagtcccaggtgctgcccacctacgacagcctggatgagccgtcagtgat

SEQ ID NO: 263 - DNA, 1253 bp, Homo sapiens
cccacgcgtccggcttctccgcccgagccgttcgcggagctgccgggggctccttagcacccgggcgccggggccctcgcccttccgcagccttcactccagccctctgctcccgcacgccatgaagtcgccgttctaccgctgccagaacaccacctctgtggaaaaaggcaactcggcggtgatgggcggggtgctcttcagcaccggcctcctgggcaacctgctggccctggggctgctggcgcgctcggggctggggtggtgctcgcggcgtccactgcgcccgctgccctcggtcttctacatgctggtgtgtggcctgacggtcaccgacttgctgggcaagtgcctcctaagcccggtggtgctggctgcctacgctcagaaccggagtctgcgggtgcttgcgcccgcattggacaactcgttgtgccaagccttcgccttcttcatgtccttctttgggctctcctcgacactgcaactcctggccatggcactggagtgctggctctccctagggcaccctttcttctaccgacggcacatcaccctgcgcctgggcgcactggtggccccggtggtgagcgccttctccctggctttctgcgcgctacctttcatgggcttcgggaagttcgtgcagtactgccccggcacctggtgctttatccagatggtccacgaggagggctcgctgtcggtgctggggtactctgtgctctactccagcctcatggcgctgctggtcctcgccaccgtgctgtgcaacctcggcgccatgcgcaacctctatgcgatgcaccggcggctgcagcggcacccgcgctcctgcaccagggactgtgccgagccgcgcgcggacgggagggaagcgtcccctcagcccctggaggagctggatcacctcctgctgctggcgctgatgaccgtgctcttcactatgtgttctctgcccgtaatttatcgcgcttactatggagcatttaaggatgtcaaggagaaaaacaggacctctgaagaagcagaagacctccgagccttgcgatttctatctgtgatttcaattgtggacccttggatttttatcattttcagatctccagtatttcggatattttttcacaagattttcattagacctcttaggtacaggagccggtgcagcaattccactaacatggaatccagtctgtgacagtgtttttcactctgtggtaagctgaggaatatgtcacattttcagcggc

SEQ ID NO: 264 - DNA, 1214 bp, Homo sapiens
gtgcagtgaggcggaatacacaagcgcagccaccgaggccggcctggagctggtggacaagggcaaggccaaggagctgccagggagtcaagtgatttttgaaggccccactctggggcagcaggaagaccaagagcggaagaggttgtgtaaggccatgaccctgtgcatctgctacgcggccagcatcgggggcaccgccaccctgaccgggacgggacccaacgtggtgctcctgggccagatgaacgagttgtttcctgacagcaaggacctcgtgaactttgcttcctggtttgcatttgcctttcccaacatgctggtgatgctgctgttcgcctggctgtggctccagtttgtttacatgagattcaattttaaaaagtcctggggctgcgggctatagagcaagaaaaacgagaaggctgccctcaaggtgctgcaggaggagtaccggaagctggggcccttgtccttcgcggagatcaacgtgctgatctgcttcttcctgctggtcatcctgtggttctcccgagaccccggcttcatgcccggctggctgactgttgcctgggtggagggtgagacaaagtatgtctccgatgccactgtggccatctttgtggccaccctgctattcattgtgccttcacagaagcccaagtttaacttccgcagccagactgaggaagaaaggaaaactccattttatccccctcccctgctggattggaaggtaacccaggagaaagtgccctggggcatcgtgctgctactagggggcggatttgctctggctaaaggatccgaggcctcggggctgtccgtgtggatggggaagcagatggagcccttgcacgcagtgcccccggcagccatcaccttgatcttgtccttgctcgttgccgtgttcactgagtgcacaagcaacgtggccaccaccaccttgttcctgcccatctttgcctccatgtctcgctccatcggcctcaatccgctgtacatcatgctgccctgtaccctgagtgcctcctttgccttcatgttgcctgtggccacccctccaaatgccatcgtgttcacctatgggcacctcaaggttgctgacatggtaacacagctgtttttatttactcccgtcggactataacgctgttgtcataagggatgccccatttatgaatgacagagtttcaaaacgatgtcatgtgact

SEQ ID NO: 265 - DNA, 2624 bp, Homo sapiens
cgcctctcccaaagtctagccgggcaggggaacgcggtgcattcctgaccggcacctggcgaggctcatgcgtcccgtgagggcggttcctcgagcctgggggcgctcagattgctttggagacgctgagagaacctttgcgagagcgccggttgacgtgcggagtgcggggctccgggggactgagcagcacgagaccccatcctcccctccgggttttcacactgggcgaagggaggactcctgagctctgcctcttccagtaacattgaggattactgtgttttgtgagagctcgctaggcgccctaagcaacagagttctgagaaatcgagaaacatgataaggaattggctgactatttttatcctttttcccctgaagctcgtagagaaatgtgagtcaagcgtcagcctcactgttcctcctgtcgtaaagctggagaacggcagctcgaccaacgtcagcctcaccctgcggccaccattaaatgcaaccctggtgatcacttttgaaatcacatttcgttccaaaaatattactatccttgagctccccgatgaagttgtggtgcctcctggagtgacaaactcctcttttcaagtgacatctcaaaatgttggacaacttactgtttatctacatggaaatcactccaatcagaccggcccgaggatacgctttcttgtgatccgcagcagcgccattagcatcataaaccaggtgattggctggatctactttgtggcctggtccatctccttctaccctcaggtgatcatgaattggaggcggaaaagtgtcattggtctgagcttcgacttcgtggctctgaacctgacgggcttcgtggcctacagtgtattcaacatcggcctcctctgggtgccctacatcaaggagcagtttctcctcaaataccccaacggagtgaaccccgtgaacagcaacgacgtcttcttcagcctgcacgcggttgtcctcacgctgatcatcatcgtgcagtgctgcctgtatgagcgcggtggccagcgcgtgtcctggcctgccatcggcttcctggtgctcgcgtggctcttcgcatttgtcaccatgatcgtggctgcagtgggagtgatcacgtggctgcagtttctcttctgcttctcctacatcaagctcgcagtcacgctggtcaagtattttccacaggcctacatgaacttttactacaaaagcactgagggctggagcattggcaacgtgctcctggacttcaccgggggcagcttcagcctcctgcagatgttcctccagtcctacaacaacgaccagtggacgctgatcttcggagacccaaccaagtttggactcggggtcttctccatcgtcttcgacgtcgtcttcttcatccagcacttctgtttgtacagaaagagaccggggtatgaccagctgaactagcacccagggacccagtgtacccagcctctggcctcgtgccctgctggggaaggcctcacccagcgaaggccggagaagcggttgggccctggcacacagggctggctcagtgtgcggacagaggagaccactctgctcctggggccagaggccattcaatagcctgccttcgtccgggcccctcctgggcctccccggccaggcacgtggcaccgtcgccttgacaccgccatctcttttctttaaggcttcaggcagcgcgcacaggctctggcagccgtctcaggcaggactgggcagcaagcttgcagccgaaggccttgccccaaactaccagcgtttctgcaagcagcttgaagggctgaccttgcagccgggtgagccaagggcactttgctgccaccgctgcattcccagagatcaagcagcccggtgccgtggccagtgaactcagaggtgctggtggacgggctaggactttggggttaggccatggggctctttctctgaaggccactttcctgacgtactctctgtacataactcagcgtccgtgactgcagtaacagccagccctacccagagtatttctgagccatgaggggcccaccagattggttctgaattggattcatgcccagcgcattagcatagtaactcctttcagattttttggagggacgtttggaagtggcttactctcttctgccctctctcctacctccaccttctcagatgagccccatctgagcacatccagctgctccttacccagcatctggagtacaggacatagctctctcctgctaccagtctgtgccttagaggtctgttaggcctgccaaacggcgaccagctcccctggagcgagggcaggccccttccctctctttccccagacacctacttgagactcaccaatttctggcctgttcaggagcctcagataagtatttgtacttgagaccacctcacacaatctgtatggggcccaaccctgatctcaaacctccttccctctgcctgaagctgtcgtccttcctatggcaggaggggggggggggtcccaggacgtgccctcatacatgacttgagcttggcagtcccctgagtttccttttatgagatcaacgcgaggggcctggtttttgaattaaagccccctcgcttcaaaaaaaaaa

SEQ ID NO: 266 - DNA, 816 bp, Homo sapiens
tcatcaggaacctcaattctcctgcactgctggaagacagtgtgataagacaagcaaaagcagctggaaaaagaatagtcttttatggagatgaaacctgggttaaattattcccaaagcattttgtggaatatgatggaacaacctcatttttcgtgtcagattacacagaggtggataataatgtcacgaggcatttggataaagtattaaaaagaggagattgggacatattaatcctccactacctggggctggaccacattggccacatttcagggcccaacagccccctgattgggcagaagctgagcgagatggacagcgtgctgatgaagatccacacctcactgcagtcgaaggagagagagacgcctttacccaatttgctggttctttgtggtgaccatggcatgtctgaaacaggaagtcacggggcctcctccaccgaggaggggaatacacctctgattttaatcagttctgcgtttgaaaggaaacccggtgatatccgacatccaaagcacgtccaacagacggatgtggctgcgacactggcgatagcacttggcttaccgattccaaaagacagtgtagggagcctcctattcccagttgtggaaggaagaccaatgagagagcagttgagatttttacatttgaatacagtgcagcttattaaactgttgcaagagaatgtgccgtcatatgaaaaagatcctgggtttgagcagtttaaaatgtcaaaaagattgcatgggaactggatcaaactgtacttggaggaaaagcattcagaagtcctattcaacctgg

SEQ ID NO: 267 - DNA, 424 bp, Homo sapiens
agatcctggagaaaagctgggccccttccatcccagataccacccacagctccaggtggagagcagtgcccactatatgccaaggaaccagccagttgctggcgggagtgaacaagacttgagaacccttcagagacagcttcttgggctcactcctctctctggagacactgttctcagcctcgcaggagtagttcccagcatcctgttctgacttcactgggaagaggagggaggtggttccaccacagggagctgagtggttccccacaatcttctcatcaaggtagaaggaatacaggatcggaggggagcccctctgtgcctcacagaggagctgcaccatgtcccccacagcagggtcagcaggcccgtggtgcagagtgagcacaggacgggatacaggagcctgcactctgacctc

SEQ ID NO: 268 - DNA, 1193 bp, Homo sapiens
cagagattccccgccgcgttccctggactcaggagctcgccgcgatgccccgccccactctccacccgctgaatgcagggcgcatgctgctacttggcggctcaagccccgcccgcaccgtccccattctctgaccgcccctctcccggtacactgcgcaggcacaacagagccgctcccctctcctcgccccgccaccgggacggagagcgcccgccgctgcatttccggcgacacctcgcagtcattcctgcggcttgcgcgcccttgtagacagccggggccttcgtgagaccggtgcaggcctggggtagtctcctgtctggacagagaagagaaaaatgcaggacactggctcagtagtgcctttgcattggtttggctttggctacgcagcactggttgcttctggtgggatcattggctatgtaaaagcaggcagcgtgccgtccctggctgcagggctgctctttggcagtctagccggcctgggtgcttaccagctgtctcaggatccaaggaacgtttgggttttcctagctacatctggtaccttggctggcattatgggaatgaggttctaccactctggaaaattcatgcctgcaggtttaattgcaggtgccagtttgctgatggtcgccaaagttggagttagtatgttcaacagaccccattagcagaagtcatgttccagcttagactgatgaagaattaaaaatctgcatcttccactattttcaatatattaagagaaataagtgcagcatttttgcatctgacattttacctaaaaaaaaagacaccaaacttggcagagaggtggaaaatcagtcatgattacaaacctacagaggtggcgagtatgtaacacaagagcttaataagaccctcatagagcttgattcttgtatattgatgttgtcttttctttctgtatctgtaggtaaatctcaagggtaaaatgttaggtgtcagctttcagggctctgaaaccccattccctgctctgaggaacagtgtgaaaaaaagtcttttaggagatttacaatatctgttcttttgctcatcttagaccacagactgactttgaaattatgttaagtgaaatatcaatgaaaataaagtttactataaataatatttcctatggggtcttcattgccagagctgtctagttcatagaatgagat

SEQ ID NO: 269 - DNA, 1020 bp, Homo sapiens
atggggctgggcccggtcttcctgcttctggctggcatcttcccttttgcacctccgggagctgctgctgagccccacagtcttcgttataacctcacggtgctgtcctgggatggatctgtgcagtcagggtttcttgctgaggtacatctggatggtcagcccttcctgcgctatgacaggcagaaatgcagggcaaagccccagggacagtgggcagaagatgtcctgggaaataagacatgggacagagagaccagggacttgacagggaacggaaaggacctcaggatgaccctggctcatatcaaggaccagaaagaaggcttgcattccctccaggagattagggtctgtgagatccatgaagacaacagcaccaggagctcccagcatttctactacgatggggagctcttcctctcccaaaacctggagactgaggaatggacagtgccccagtcctccagagctcagaccttggccatgaacgtcaggaatttcttgaaggaagatgccatgaagaccaagacacactatcacgctatgcatgcagactgcctgcaggaactacggcgatatctagaatccggcgtagtcctgaggagaacagtgccccccatggtgaatgtcacccgcagcgaggcctcagagggcaacatcaccgtgacatgcagggcttccagcttctatccccggaatatcatactgacctggcgtcaggatggggtatctttgagccacgacacccagcagtggggggatgtcctgcctgatgggaatggaacctaccagacctgggtggccaccaggatttgccgaggagaggagcagaggttcacctgctacatggaacacagcgggaatcacagcactcaccctgtgccctctgagctcgtgagcctgcaggtcctggatcaacacccagttgggacgagtgaccacagggatgccacacagctcggatttcagcctctgatgtcagctcttgggtccactggctccactgagggcacctag

SEQ ID NO: 270 - DNA, 462 bp, Homo sapiens
ggaattccaggaggctgccaagctgtaccacaccaactatgtgcggaactcgcgggccatcggcgtgctgtgggccatcttcaccatctgctttgccatcgtcaacgtggtgtgcttcatccagccctactggataggcgacggcgtggacaccccgcaagccggctatttcgggctcttccactactgcatcggcaacggcttctcccgggagctgacctgcaggggcagcttcacggacttctccacgctgccctcgggcgccttcaaagccgcctccttctttatcggcctctccatgatgctcatcattgcctgcatcatttgctttaccctcttcttcttctgcaacacggccactgtgtacaagatatgtgcctggatgcagctcacctccgctgcctgccttgtgcttggctgtatgattttccctgatggctgggactcagatgaagtaaaccg

SEQ ID NO: 271 - DNA, 1018 bp, Homo sapiens
tatccgcagcttcagcttccgccgcctcttcagccctcggcgccgccgcctgacccgcaggccgccgcggccgcaagagcccatgagggcgcgggcaccgccgccgcctccgcggcgtcgccgtcgtcccggagcgccccgagctggcgcgggcatggccgcggcatgagcgtggagccgccgccggagctggaggagaaggcggcgtcggagcccgaggcgggagccatgccggagaagcgcgcgggcgcgcaggccgcggggagcacctggctacaaggctttggcccaccaagtgtgtaccatgctgctattgtcatcttccttgaattctttgcgtggggccttttgacaactccaatgttgactgttctacatgaaacattttctcaacacacattcctcatgaatggtctcattcaaggtgtaaagggcctgctctcttttttgagtgccccactcattggtgccctgtctgatgtgtgggggaggaagccctttctcctcggcactgtattctttacctgcttcccaatcccactgatgaggatcagcccatgtttatgcaaataccgtatacgtgataaacgtccctacaacatgatctttggaatgaactaagacaaaggaaactctgaggaaggaccatggcctgagaggtggaattcatccttccgaggactgagatgaggacggaaaatgaaccatcggggggattgacggtgaagatgctaatacctgcccagcatcgaccctagtgcgggtcccaagaccatccccctgtgcaggctccaccaccgctgtgctaactggaccgcggcagaagagtgggtgtgtgccaggtttctgctgggccctgcagctcctccccccagccccatgtgatgtgcccctggccattgacactcagttcgagggaaggcactggggtgtacactcaaagacctaaacccagggtgggtgcggtggctcacgtctgcaatcccagcactttgggaggctgaggcgggtggatcac

SEQ ID NO: 272 - DNA, 1018 bp, Homo sapiens; identical to SEQ ID NO: 271

SEQ ID NO: 273 - DNA, 1196 bp, Homo sapiens
ccggccggattcctgggcgacatttccgcactgggcgcgcgagagctgctagggcggtttctctgcctcgggcctgttgggcagggccggctaaggtgcgcgtgctcgctggttctaacccttctgttgggcgtttctgcggagaggcgggaggcgctgagagtctgtgcggaggtccatgcacagactgctttgcctgttgttgctcttcggaggcggcgatccccgaaggcgagctgaaatacggctgcaggctacaatttgcagccgacgattaaggaagacgacgagcgggagaggtggcccaccctcatggagcgcttgtgctcggatggcttcgcatttccccattactacattaaaccgtatcatctgaagaggatccacagagctgtcttacgtggtaatctggagaaactgaagtaccttctgctcacgtattatgacgccaataagagagacaggaaggaaaggactgccctacatttggcctgtgccactggccaaccggaaatggtacatctcctggtgtccagaagatgtgagcttaacctctgcgaccgtgaagacaggacacctctgatcaaggctgtacaactgaggcaggaggcttgtgcaactcttctgctgcaaaatggcgcccgatccaaatattacggatgtctttggaaggactgctctgcactacgctgtgtataatgaagatacatccatgatagaaaaacttctttcacatggtacaaatattgaagaatgcagcaaggtataggtcaaccaatgttattttcaaactatctgaaatgcatttattttaacattgacacatgtaagggtcaatttttcatatttggaagctcaaacattccttgaatgaaaatattttgaaatgccttaactgtctaagattttactttaaatattggaacttttaaagaagcattatagggaacagccttttttcatgcacttatggtaaataactataaaaacaaatgaattacaataaatttataattcatgacaactgaatttgggaaaggtaatagttaagtgtttttcccctaaattactttttttctaatcagtgtgaagtgacacaggaaagtaaaattgtcccttataaataggctttattttaaatgtcaaagaaaattaaagaatttcccaataaatgtacatgttgttgctgttgaaaa

SEQ ID NO: 274 - DNA, 607 bp, Homo sapiens
cttcagcatggaaagcccgttacaatctgcctgttcagggattcaggctggaacagctggcgaggcctatgagcaggtttactgctggagtccttgggtaggctgccttggtgactgatcagcggggacttgtgcctgataccttggtccataagacatgggcctggttctggggcagtcctggagcctccatatgtggaaggcgttctggagctgaggtgccataatctttcacctgggttccttagctcttgtgaaggtatcttcatgcatggatggtagttcaaactgatgtttctttgaaagactctggccttgtcaaaagaaggacgtaagaaggcacgatgtattatacttgggaatgatagaagagactgacctggtatttccacccggaagagggaaaggattttaactacaaatacaggaatccagcagatggcatcagagaacactataaaaaagaaacgatttgcaacagccacctctcttccaaaacaattccttacttctgtgggctgcaaggcgggttctttgaatggaacacaacatactcctattagaaacaccatgatgagaaaagccagcccgttcacacctagtggga

SEQ ID NO: 275 - DNA, 517 bp, Homo sapiens
  misc_feature (1)...(517): n = a,t,c or g
tagttgaaaccataaggacactcgttgtatcagtcgtacaacacgctgacgtaacacatataccaaatgtctaaaggccggggnnnnnnnnatttgaaaccttggttagaccccctgaaanccgcgncgacccacgcgnccgggaggactgcagggccagnccccagggccaggcatgcaggggccccctcccatcacgcccacctcctggagcctgcccccgtggagggcctacgtggctgccgccgtgctctgctacatcaacctcctgaattacatgaactggttcatcattgcaggagtgctgctggatatacaggaggttttccagatcagtgacaaccatgctggtttgcttcaaactgtcttcgttagctgcctgctgctgtctgcacctgtgtttggctacctgggcgaccgacatagccgcaaggctaccatgagcttcggtatcttgctgtggtcaggagctggcctctctagctccttcatctccccccggtattcttggctcttt

SEQ ID NO: 276 - DNA, 1133 bp, Homo sapiens
ggcacgagggctccttggtaccatgtgggaagcgctgtgaagagttgttgccttccaagatatacccaaattcccagttccagcccgtgtcattaaaactccgctggcgtgaaagatgacgtccttagcccagcagctgcaacgactcgccctccctcaaagtgatgccagcctcttatccagagatgaagttgcttctttgttatttgaccctaaggaagcggccacaatcgacagggacaccgccttcgccattggatgtactggcctggaagagttgcttggaattgatccttcctttgagcagtttgaagcaccgttgttcagtcagctagcaaaaaccttggagcgaagtgttcagaccaaagcagtaaacaaacagttggatgaaaacatttcattattccttattcacttgtcgccttacttcctgcttaagccagcacagaagtgtctggagtggttgattcacaggttccatatacatctctataatcaagatagcctcattgcttgtgttctgccataccacgagacaagaatatttgtgcgagtcatacagcttctaaaaattaataattcaaagcacagatggttctggttgttgccagttaagcaatctggagtgccgttagctaaaggaactttgattacccactgctacaaagatcttggattcatggatttcatttgcagtttggtgacaaaatctgtgaaggtttttgctgagtacccgggcagctcagctcagttgagggtgctcttggctttctatgcttctaccatagtgtcggcgctggtagctgcagaggacgtatcagacaatatcatcgccaaactattttcctatatccaaaagggattgaaatcatctttaccagattacagagctgcaacatacatgataatatgtcagatttctgtgaaagtgaccatggaaaatacctttgtgaattcattggcatcacagatcatcaaaacattgaccaagattccctctttgatcaaggatgggttaagttgcttgatagtgctcctgcagagacagaagccagagagccttgggaaaaagtatgtacaattgaattgagaaatggtgctagtcagaggtgaataaaattattttgaataaa

SEQ ID NO: 277 - DNA, 724 bp, Homo sapiens
gtggaggtgccctcggctgtgcccaggcctactttggataccagcagagcagctacctgtgccccagggcatgctgttcaccacccccagtccctcagctggcccagaactgctggcactgttggaggcagccctgcgctccggggcgcccatccctgacccctgcccaccgttcctgcagactgctgtgagccctgagagcagtgccctggccgccgtggacagcagcggctctgtgctccttctcacctcctcgctcaactgctcctttggctctgcacacctgtccccaagcactggggttctgctcagcaacctggtggccaagtctaccactagtgcctgggcctgccccctcatcctccgtggcagcctggatgacacagaggctgatgtgttggggcttgtggcttcagggacccctgatgtggccagggccatgactcacaccctactcaggcatctggcagcaaggccccctacccaggcccagcaccagcatcagggtcagcaagaaccaacagagcatcccagcacttgtggccaagggaccctgctccaggtggcagcccacacagagcacgcccatgtctccagtgtcccccatgcctgctgccccttccaggggttctaacaggatgggggtgggtctggcagaaggcagagttatttgaagcatgggggcaggagcagagcagacacagcagcaatggagtgtgcaccc

SEQ ID NO: 278 - DNA, 5014 bp, Homo sapiens
tttcgtccaacagccagctttatagggcatcagccttgtttgaaacaatccgacatgaggcacagctgagcacggactacaaactctccctctttgacctgcagacatcatcctaccaggccttgcagcgggtgctcgtcagcctaggccatcatgatgaagccctggctgtggcagaaaggggacggacaagggcatttgctgatcttctggtggaacgacaaacaggacaacaagactccgacccctactccccagtcactattgatcagatcttagagatggtaaatggccagaggggactagtgctttactattccctggctgcaggctatctgtatagctggctgctggctcctggggcaggaattgtgaagtttcatgaacactacctgggtgagaacacagtggaaaactcaagtgacttccaggccagcagcagtgtaacccttccaacagcaaccggctcagccctggagcagcacattgccagtgtccgggaggccctgggggtggagtctcactactcaagggcctgtgccagcagtgagacagagagtgaagcgggagacatcatggaccagcaatttgaagagatgaacaacaaactcaactcggtcactgaccccactggctttctgcggatggttcgccgcaataacctgtttaacaggagctgccagagcatgacgagcctgttcagtaacactgtgtcaccgacccaggacgggacctcctctcttcccaggaggcagagctcgtttgccaagcccccgctccgtgccctgtatgacctgctcatcgcgcccatggaagggggcctgatgcactccagcggccccgtgggccggcaccggcagctcatcctggttctggagggggagctctacctcattcctttcgccctcctgaagggaagctcctccaatgagtacctctacgagcgcttcggcctccttgctgtcccttccatccgctccctcagcgtgcagtccaagtctcacttacggaagaacccgcccacatactccagctccacatccatggcggctgtcatcggcaaccccaagctaccatcggccgtgatggacaggtggctgtgggggcccatgccatcggccgaggaagaggcctacatggtgtccgagctgctgggctgccagcccctagtgggcagtgtggccaccaaggagagggtcatgagtgccctgacccaggctgaatgcgtccactttgccacccacatctcctggaagctgtcggccttggtcctcacgcccagcatggacggcaaccctgccagcagcaagagctccttcggccacccctacacgatccctgagtccttgcgggtgcaggacgatgccagtgatggggagagcatctcggactgcccgcccctgcaggagctgctgcttactgccgccgacgtcctggacctgcagctgcctgtgaagctggtggtgcttggctcctcccaggagtccaacagcaaagtcgcagccgacggggtcatcgcgctgacaagggccttcctggctgccggcgctcagtgtgtcctcgtgtctctgtggcctgtgccagtggctgcttttaagatgttcatccatgccttctactcatccctgctgaacggcctgaaagccagcgccgccctgggggaggccatgaaggtggtgcagagcagcaaggccttctcgcacccctccaactgggcagggttcatgctcatcgggagtgacgttaagctgaacagcccctcatcactcatcggccaggccctcacagagatcctgcagcacccggagcgtgcgcgggacgccctgcgagtgctgctgcacctggtggagaaatccctgcagcgcatccagaatgggcagcgcaatgccatgtacacatcccagcagagtgtggagaacaaagtgggcggcatccctggctggcaggccctcctcaccgctgtgggcttccggctggaccccccaaccagtggcctgccagcggctgtcttcttcccaacctccgacccgggcgaccggctccagcagtgcagcagcacactccagtccctgctgggtctgcccaatcctgccctccaagccctttgcaaactcatcactgcctccgagacgggcgagcagctcatcagccgggctgttaaaaatatggttggaatgctccaccaggtgctggttcagctccaggctggcgagaaggagcaggacttggcatcagctcccattcaggtctccatcagcgtccagctgtggcggctcccgggatgccacgagttcctggcagctctaggttttgatctctgtgaagttggtcaggaggaagtaatcctgaaaaccgggaagcaagctaatcgacggactgtgcacttcgcgctccagtccctgctgtctctgtttgattctactgagctacccaagcgcctcagccttgacagctcctcctccctcgagtctcttgcttctgctcagtctgtttccaacgccctgcccttgggttaccagcaaccccccttctctcccaccggtgcggacagcatcgcctcagatgccatctctgtgtacagtctgagctccattgcctcctcaatgagctttgtctccaaacccgagggtggatcagagggtggaggccccggaggacggcaggaccatgaccggtccaagaacgcttacctgcagagatccaccctgcctaggagccagctgcctccccagacccgccctgcaggcaacaaagatgaagaagaatatgaagggttttctatcatcagtaacgagcccttggcgacctaccaagaaaaccgaaacacatgcttctcaccagaccacaaacaaccccaacctgggacagccggaggcatgagagtctcggtgagctccaaagggagcatcagcactccaaattctccagtgaaaatgactctgattcccagccccaactcacccttccaaaaggtgggaaaactagcaagctcagatacaggagaatcagaccagtctagcacagaaacggacagtaccgtgaaatcccaagaagaaagcaacccaaaactggatccacaagagttagcccagaaaattctggaggagacacagagtcatctcattgcggtggagcgtcttcagaggagcggcggccaggtgagcaagagtaataaccctgaagacggcgttcaggcgcccagcagcactgctgtcttcagagcgtcagaaaccagtgcgttcagcaggcctgttctctcccatcagaagagtcagccatcaccagtcactgttaaaccaaagcccccagccaggagctcctccctgcccaaggtgagttccggatatagcagccccaccacctcagagatgtccatcaaagacagcccgagccagcacagtggccggccatcgcccggctgcgactcacagacttcccagctggaccagcctctctttaaactgaagtaccccagctctccttacagcgctcacatttccaaatcaccaaggaacatgtccccaagctccggccaccagtctcctgctggcagtgcaccctccccagctctctcctactcctcagctggatctgctcgctcaagtccagcagacgctcccgacatagacaaactgaaaatggcagccattgatgaaaaggtgcaggctgtccataacctgaagatgttctggcagagcacaccccagcattccacagggccaatgaagatcttccggggggctcctggcacgatgacttccaaaagggatgtcctcagtctgctgaatttgtcaccacggcccaataagaaggaggagggagtggataagcttgaactgaaggagctgtccctgcagcagcatgacggagctccaccgaaagcccctcccaacggacactggcgcaccgagaccacctcgctgggctcactgccgctgcccgccggccctcccgccacagcccccgcgcgccctttgaggcttccttctggaaatggctacaagttcctgtctccaggaagatttttcccttcttccaaatgctaaagcatcttttatacccactgactctgagcagcctgcagatgggggcctggcgtttgcttcagcccttccctgagtgcagtccccccacagccaccagcaccctcatgatgctgtgctctgcaggcgaggggcaccaccacgtccaaaggctgccacacacactggtggcttttctgggccacattcaccaaaagccaggacttctgtggggctggtacaggaggctcatggaatttcctacacacttcaccaaatgtttgtttacctttgaactccctgcttctcatctttgatatgattcttcaccaggattttgtacaaaaatgatcatggttctggggtggggagaggaaagggagcacatattttgctaagaggtatatatgcagtaccttttataccacagaaatacaaatagagctttttcctaaggctttcggttgcctggttgggggtgggatatatgaaatttcagttgaattctacaggaaagtgttatattagcccaaaaacagaaaaatggtttttaaaatgccaatgatttgtaattaaattgtagcaattttggtctcatgatagtgtaatatctcagcaacaatgcaataattcacattgaaacagcgcttccattctgaactcctgctctgcaaatgtcttttgggtcccgctgtcaaccaaacttgaattttcttaaaaaaaaaattatgtaactcttatccaggcattttagaactatgcaattgtgatttaaaatgcaactttgtgcttttaaaacattattgaccttttttgtatatggataaacaacttggttttattatcaatagtactttgcatttatagctattatttttaaaagctcaaaaagttttttaaaatgtcaaattttgaatagtcatcaataagtaattatcaagtttggaaggaaaggttgaaatgactccgtttccttataagcaaaaaaaaaa

SEQ ID NO: 279 - DNA, 888 bp, Homo sapiens
tcttacagactggaacctacctttggcttttatgaaaaagaggctctgtgagaaaattgaaggctccaaatccttagctcagagctggaggatgaaggatcggatgaacacagtcagtgttgccttagttttgtgcctgaatgttggtgtggaccctcccgatgtggtgaagaccacgccctgtgcacgcttggaatgctggatcgatcctctgtcgatgggtcctcagaaagctctgggaaccatcggtgcaaatttacagaagcagtacgagaactggcagccaagggcccggtacaagcagagccttgacccaactgtggatgaagtcaagaagctctgcacgtccttacgtcgcaacgccaaggaggagcgagtcctctttcactacaatggccacggggtgccccggcccacagtcaacggggaggtctgggtcttcaacaagaactacacgcagtacatccctctgtccatatatgacctgcagacgtggatgggcagcccgtcgatcttcgtctacgactgctccaatgctggcttgatcgtcaagtccttcaagcagttcgcactacagcgggagcaggagctggaggtagctgcaatcaacccaaatcaccctcttgctcagatgcctttgcctccgtcgatgaaaaactgcatccagctggcagcctgcgaggccaccgagctgctgcccatgatccccgacctcccggctgacctattcacctcctgcctcaccacccccatcaagatcgccctgcgctggttttgcatgcagaaatgtgtcagtctggtgcctggcgtcacactggatttgatagaaaagtaagtaggatttttaagctcttggggctctctggatctgatgagtttcttttcctt

SEQ ID NO: 280 - DNA, 1919 bp, Homo sapiens
ttttttttttttaaaatatgaaccattttattgaagaacagttatacagtgtagctacagatactgactagatactaaatatttctgcctgatttttcattgtcttcacaagttagggaatagaaatcaaaaaaccaaaaatctcaaatgatttagctgtccagaacatatttgacaggtggataaatttataacagctctgacatataaatttctaattagagaatcctttcattttgaaaaaattgagatgatattaccctaatgaagtttttacctgaagttaacaaagtcctggatttgatatattactttgaatgcattaattctgaaaatttatatttagttctactttataacatttcttctcttaaggatgggatatgaggtacacatgagctggtttctacagtatgaatgtatgtacatatataaagtatggttgtaaaggagtgggtgatttgcaaataaagcacattatacacaaaatataaataacttcccttttaaaagttactgagaataaagaatatagaacatggttataggcacttacattgctatcaaatgcaggaattcacttcaataagaagtgctttctttgtaagcatggttcatggcaatagaagctccaactttggagaggatgctttccgtgacaaaaataataaccacaaaaaaaatggtggttgaaggaaaacagtccaaatttacagatgctttaaacttcttttggccttggcatcagctttcatgttaaaaaataaagctggtggggaagctatctcacttgcaaagtaaatggcttgtatgagattggcgaatcttggtcagatattgcatttttaaagcacaaaaccaccggccaccaatatcttcctgtgcatgcatataaattattttcttctaattcaaatggcagcagaggaatcccggcgtgcatgtgcatggagacacacacacatcactaaggacacaggacaaactatcataaaataagcagtatcccaaacacatcatcatctataggctgttttacaaaggtagaatacaaacgaactgaatgtctcaggtaaaaggcaaagtctatttctccatctctgctgcgctcatttatcttcttaaggctttcaacagaaagcaccgttttatgaaacaggcaattcagtacccagagcttgactggagacactaatcaggattgaagtcttgatgcagttcataaaaacccacttaaaaaaaggcatcaaaaaccacatttaaaataaagctgtccatatataaagaatgaagtgtttagaagttcccagcttgtatcctaataagagtactgaaaggtttaatattagcagcctgtgaacacgtagtgaagaaagagtctgagaaccaagttaacatccttattccactctaattccacccatgccatgggtaaaaacagttcttgcagtctagagtttctcctccgatggtttaaccatcagatttttacatcttgggattcaaccatcttggcaagcgtcttcttaattctcaatgctgtgagtctggaggctggattgtgggcccagcattctgacattagcttcaaaactgctcgtagacattcatcactgttccaccgattagacacaattggccgcaaacgtttgacacacacaacctcacgcatatcttcgtatgacggatcactcggtaccatgttgtaatatggcaattggtattcttccccgatccctataagggaatgagaaaacatgggcacaaaaatggttgctggacaagatataccaatctagtaagcatcttttgctaaactatggaactaaaacggattcttacacaagaaaaaatatagaccctatgattccctcttaatagtagaagtatgtttttctcttatttatgtccaactattt

SEQ ID NO: 281 - DNA, 1919 bp, Homo sapiens; identical to SEQ ID NO: 280

SEQ ID NO: 282 - DNA, 654 bp, Homo sapiens
  misc_feature (1)...(654): n = a,t,c or g
ctccccgtctcttccctggccttgccctctctctttctgccctgtagccgcgggcgtccaaatgaagctggaattcctccagcgcaaattctgggcggcaacgcggcagtgcagcactgtggatgggccgtgcacacagagctgcgaggacagtgatctggactgcttcgtcatcgacaacaacgggttcattctgatctccaagaggtcccgagagacgggaagatttctgggggaggtggatggtgctgtcctgacccagctgctcagcatgggggtgttcagccaagtgactatgtatgactatcaggccatgtgcaaaccctcgagtcaccaccacagtgcagcccagcccctggtcagcccaatttctgccttcttgacggcgaccaggtggctgctgcaggagctggtgctgttcctgctggagtggagtgtctggggctcctggtacgacagaggggccgaggccaaaagttgtcttccatcactcccacaaacacaagaagcaggacccgctgcagccctgcgacacggagtaccccgtgttcgtgtaccagcccggccatccgggaggccaacggggattcgtggagtgcgggcccttnccagaaagggtatttgttggtgcangcagattccnaacattaaact

SEQ ID NO: 283 - DNA, 631 bp, Homo sapiens
cggagtacggcacgagccaggttggagcctaccagcccttcttccgtggccatgccaccatgaacaccaagcgacgagtgccctggctctttggggaggaacacacccgactcatccgagaagccatcagagagcgctatggcctcctgccatattggtattctctgttctaccatgcacacgtggcttcccaacctgtcatgaggcctctgtgggtagagttccctgatgaactaaagacttttgatatggaagatgaatacatgctggggagtgcattattggttcatccagtcacagaaccaaaagccaccacagttgatgtgttccttccaggatcaaatgaggtctggtatgactataagacatttgctcattgggaaggagggtgtactgtaaagatcccagtagccttggacactattccagtgtttcagcgaggtggaagtgtgataccaataaagacaactgtaggaaaatccacaggctggatgactgaatcctcctatggactccgggttgctctaagcactaagggttcttcagtgggtgagttatatcttgatgatggccattcattccaatacctccaccagaagcaatttttgcacaggaagttttcattctgttc

SEQ ID NO: 284 - DNA, 3914 bp, Homo sapiens
gtgggagggacagcagggcttagagtgggggtcattgtgcagatgggaaaacaaaggcccagagaggggaagaaatgcccaggagctaccgagggcaggcgacctcaaccacagcccagtgctggagctgtgagtggatgtagagcagcggaatatccattcagccagctcaggggaaggacaggggccctgaagccaggggatggagctgcagggaagggagctcagagagaaggggaggggagtctgagctcagtttcccgctgcctgaaaggagggtggtacctactcccttcacaggtcatgctccatttttccatcgggaccatcaagagggtgtttgtgtctaaggctgactgggtaactttggatgagcggtctctccgctctgagcctgtttcctcatctgtcaaatgggctctaacccactctgatctcccagggcggcagacaatgccgtcttctgtctcgtggggcatcctcctgctggcaggcctgtgctgcctggtccctgtctccctggctgaggatccccagggagatgctgcccagaagacagatacatcccaccatgatcaggatcacccaaccttcaacaagatcacccccaacctgggctgagttcgccttcagcctataccgccagctggcacaccagtccaacagcaccaatatcttcttcttccccagttgaggcattcgttacagccttttgcaatggttcttccctgggggaccaaggcttgacactcacgatggaattctggggagggccttgaattttcaaccttcaagggagattttccggaggctcagatccatgaaggcttccagggaactcctccgtacccctcaacccagccagacacgccagctcccagctgaccccaccggcaatggccctgttcccctcagcgagggccctgaagcctagttgggataagtttttgggagggatgttaaaaaagttgtaccccacctcagaagcccttcacctgtccaaccttcgggggacacccgaaggaggcccaagaaacagatccaacgatttacgtgggagaagggtacttcaagggaaaatttgttggatttggtcaaggagctttgacagagacacagttttttgctctggtgaatttacatctttcttttaaagggcaaatcgggagagacccttttgaagtcaaaggacacccgaggaaagaggactttcacgttggaccagggcgtaccaccgtggaaggtgccctatgatgaaagcgtttagggcatgtttaacatccaagcactgggaagaagcctgttccagcttgggttgctgctgatgaaataacctggggcaattgccaccggcaatcttccttcctgccctgatgaggggaaactacagcacctggggaaaatgaactcaccccacgatattcattcaccaagtttcctgggaaaatgaaagacagaaggtcttgcccagctttacattttacccaaactgttccctttattgggaaccctattgattttgaaggagcgttcctggggttcaactgggggcatcacttaagggtctttcaggcattggggctgacctttccgggggtcacagagggaggcacccctgaaagctcttccaagggccgtgcataaaggctgtgcttggaccatcggacgagaaagggactgaaagctgctgggggccatgttttttaggaggccttaccctgtcttttcccccccgaggttcaatttcaacaaaccctttgtcttcttaatgatttgaacaaaataccaaacttgaccaggcccagcaggccccagaagaccattaccctatatcccttctcctccccagtcacatggccataggcctgctgatggctcaggaaggccattgcaaggactcctcagctatgggagaggaagcacatcacccattgacccccgcaacccctccctttcctcccctgagtcccgactggggccacatgcagcctgacttctttgtgcctgttgctgtccctgcagtcttcagagggccaccgcagctccagtgccacggcaggaggctgttcctgaatagcccctgtgcccagaaatcttcctctggcctagttgtggagcctggcctaagtcgcacattgctggagatggtgaagctgaccagcatgagaggtcagtttctagaagcccaaatcccaacaggcataagcctcaccctccaatatcagctctatcagaaacaaacaaacaaaaacatgtcttattcatttgtccttttcctcaaatgggtggcacttgggcagggcagaagggctggttatccaagcttggaagatgctgacagcagacgcttcaatggcagtaggagttttctgatcactgtcattggtatcacgcttactgttgaaatcgtgacatcaggaatgatgaaaggaactagagtcagatggtctggagcggggaatgaggggatgatggggctggaagagggaaggaatgaaaggagtgtgaaggaagcgccaccaaggagagctgtggaagcccaacccaaagaccgcacctgggatgtcgggaagggccaaggtacagaaggagaaggaagagggttggaggtggagggccagcagcaccaaggctcggagccagggacaataccattctctgtctcatggggcgtcctcctgctggcaggcctgtgctgcctggtccccagctccctggttgaggatccccaggaagatgctgcccaaaagacggatacatcccaccatgatcaaggggactgggaggaccttgcttgccagaagatctcctataacgtcaccgacctcgcctttgatttgtacaaagagctggctgatctatcacaaaccagcaatgtcttagtcaccccaacaagcgtggctatggcctttgcaatgctctccctggggaccaaggctgacactcgcacagagatcctggaaggcctgaatgtcaacctcacagagacgcctgaggccaagatccacgaatgcttccagcaagttctccaagccctcagcaggccagacacccggctccagctgaccaccggcagtagcctgtttgttaacaagagtatgaagctagtggacacgtttttggaggataccaagaagctgtaccactcagaagcctcttccatcaacttcagggacaccgaggaggccaaagagcagatcaacaattatgtggagaaaagaactggaagaaaagtagtggatttggtcaaacacctgaaaaaagacacaagtcttgccctggtggattacatttcctttcacggcaagtggaaagataaattcaaggctgagcgcattatggtagagggcttccatgtggatgataagaccatcatcagagtgcctatgataaaccacctgggtagatttgacatccaccgggacagggagttatccagctgggtgctggcacagcactatgtggggaacgccactgccttcttcatcctgcccgatccaaagaagatgtggcagttggaagaaaaattgacctacagccaccttgaaaatatccagagagcctttgacataaggtctatcaatctacattttcccaaactgtccatttctggaacctacaaactcaagagagtccctaggaatctgggcatcaccaagatcttcagcaacgaggccgacctctctggagtcagtcaggaggcacccctgaagctctccaaggctgtgcatgtggctgtgctcaccattgatgagaaagggaccgaagccaccggagccccccatctggaggagaaggcctggtctaagtatcagacagtcatgttcaaccgacccttcctggtcatcatcaaggagtacatcaccaactttccgctcttcattggaaaagtggtgaatcccacccaaaaataa

SEQ ID NO: 285 - DNA, 1479 bp, Homo sapiens
aggatgaagggcggtgagggggacgcggtcgagcaggccccgctgaaccctgagggcgagagccctgcaggctcggccacgtaccgggagttcgtgcaccgcggctacctggacctcatgggggccagtcagcactcgctgcgggcgctcagctggcgccgcctctacctcagccgggccaagctcaaagcttccagccgcacgtctgccttgctctcgggcttcgccatggtggccatggtggaggtgcagctggagagtgaccacgagtacccaccaggcctgctggtggccttcagtgcctgcaccaccgtgctggtggctgtgcacctctttgcactcatggtctccacgtgtctgctgccccacattgaagctgtgagcaacatccacaacctcaactctgtccaccagtcgccacaccagagactgcaccgctacgtggagctggcctggggcttctccactgccctgggcacctttctcttccttgctgaagttgtcctggttggttgggtcaagtttgtgcccattggggctcccttggacacaccgacccccatggtgcccacatcccgggtgcccgggactctggcaccagtggctacctcccttagtccagcttccaatctcccacggtcctctgcgtctgcagcaccgtcccaggctgagccagcctgcccaccccggcaagcctgtggtggtggtggggcccatgggccaggctggcaagcagccatggcctccacagccatcatggtacccgtggggctcgtgtttgtggcctttgccctgcatttctaccgctccttggtggcacacaagacagaccgctacaagcaggaactagaggaactgaatcgcctgcagggggagctgcaggctgtgtgagactggtgttagccaccgctcactgcaagcactgcctccctccggggtctgtaagaggccgcaggggcctacagacctcatccccccatcccctggctggagccacttccagtggccactctcaggcagagttcagattcctgcccgcagggtcctctgggctgggccttggggcagctcccacattcccagggattttccccatcagtctgtcccttgggttttgcaagctactctgcacctgggctggcctcagttgaaggatcatgcagtagatagaggggaggcagggagagcttgtgggaccttcagtgctgactttagccaccatttccattcctatacaggatgtgaaggtcagaaggcagccaattgttggtttaattttttttttttttgagacagtctgtttcccaggctggagtgtagtgatacagtcacagctcactgtagcctcgaccttccaggctcaaaagatgctcccaccacagcctcccaggtagtgagtagctggtactacaggtgtgtgctgccacacccgactaaatttttttgtagagacggggtttcgctgttcccagggtggtt

SEQ ID NO: 286 - DNA, 502 bp, Homo sapiens
cagtggtcgagtctccttttctccttggtgtctctcattggagcaatgatagtttattgggtgcttatgtcaaattttctttttaatactggaaagtttatttttaattttattcatcacattaatgacacagacactatactgagtaccaataatagcaaccctgtgatttgtccaagtgccgggagtggaggccatcctgacaacagctctatgattttctatgccaatgacacaggagcccaacagtttgaaaagtggtgggataagtccaggacagtccccttttatcttgtagggctcctcctcccactgctcaatttcaagtctccttcatttttttcaaaatttaatatcctaggcatcaacaaccaggtcatccttccaggtgtcaccgaaatgccaggctattgccccttcctgctgcctgtctcaactgaatgctgtgctgtggccacatcatacacatgttttgaagagaagaatataggacaatgttgca

SEQ ID NO: 287 - DNA, 1659 bp, Homo sapiens
  misc_feature (1)...(1659): n = a,t,c or g
ctgagacgggaagatagtcttcaggaaagacacacaaaggtaacttgtgcagagggagatggcaaatttatancttctcagaaacccagtaatgataagtaaccaaggacttccaccaaagtcagtcccacgatgacgatggtcagccagagtattgataacctcttagaatcatccagaaacaagtcactcttcatctgtccagcaaaggcctgctcagcgtggaggcctcagaacgtgaggaaggagctgtccagcacggatgagtccaggcagctgtcgacgtccagcacctgctgcccggcaggtgtggggctcgggctcccagccaccttgctccgggacatccggaagagaaagaggatggccaggtagacgggatagacaaccacgctggacatccagagggccacctgctgcgttctcctcatctgcctcttcctgggcgccaacgccgtgtggtacggggctgttggtgactctgcctacagcacggggcatgtgtccaggctgagcccgctgagcgtcgacacagtcgctgttggcctggtgtccagcgtggttgtctatcccgtctacctggccatcctctttctcttccggatgtcccggagcaaggttatcaatactctggctgaccatcgtcatcgtgggactgactttggtggaagtccttggttacttatcattactgtgtttctgagaagttataaatttgccatctccctctgcacaagttacctttgtgtgtctttcctgaagactatcttcccgtctcaaaatggacatgatggatccacggatgtacagcagagagccaggaggtccaaccgccgtagacaggaaggaattaaaattgtcctggaagacatctttactttatggagacaggtggaaaccaaagttcgagctaaaatccgtaagatgaaggtgacaacaaaagtcaaccgtcatgacaaaatcaatggaaagaggaagaccgccaaagaacatctgaggaaactaagcatgaaagaacgtgagcacggagaaaaggagaggcaggtgtcagaggcagaggaaaatgggaaattggatatgaaagaaatacacacctacatggaaatgtttcaacgtgcgcaagcgttgcggcggcgggcagaggactactacagatgcaaaatcaccccttctgcaagaaagcctctttgcaaccgggtcagaatggcggcagtggagcatcgtcattcttcaggattgccctactggccctacctcacagctgaaactttaaaaaacaggatgggccaccagccacctcctccaactcaacaacattctataattgataactccctgagcctcaagacaccttccgagtgtctgctcactccccttccaccctcagctctaccctcagcggatgataatctcaagacacctgcggagtgtctgctctatccccttccaccctcagcggatgataatctcaagacacctcccgagtgtctgctcactccccttccaccctcagctccaccctcagcggatgataatctcaagacacctcccgagtgtgtctgctcactccccttccaccctcagcggatgataatctcaagaaactaaggaagaataaataaataatataaaaataaaatgaatactgcagtcaaaaaa

SEQ ID NO: 288 - DNA, 1293 bp, Homo sapiens
gtattttggaaaaatggtaaagaagtgcagagtcaagtcatagcgactaataatgggttattttcttaaattgtatgcttatgttaattctcacagtctttttgtttgggtctgtgacagatcttacaaaagatcttttagacctatgattcttaacaaaattaaagaattaagtcggaaccaatttcccacaatgtctcatctaagaaaggactcacaggccagcagcccaggagatgacgcaatggacaggagtgggctccctgaccttcaaggaagatttgagctatctgggaaaaacaagacagtatccactggatgcattggaaccccaaccccagcattggggatattaaggacattaaaaaagcagccaagtctatgctagacccagcacataaatctcatttccaccctgtgaccccaagtttagtattcttgtgtttcatatttgatgggttacaccaggcattactgagtgttggtgtgagcaagaggtctaatactgtggttgggaatgagaacgaggaaaggggtactccttatgctagcagattcaaagatatgcctaactttattgcccttgagaagtcatcagttctccgccactgctgtgaccttttgataggcgttgcggctggatcaagtgataagatttgcaccagcagtctccaagttcagagacgattcaaggcaatgatggcatctattggaagactttcacatggtgagagtgctgatctgctaatcagctgcaatgcagaatcagccataggttggatcagctcaagaccgtgggttggagaattaatgttcacatttctatttggagactttgaatcccctctacacaagctacgcaagtcaagttagttgccaagaaagcacagatgacaacctattaatgctgtgagaatgtttctagatcagtgcatggatggctccattgctctacgggccattgtgtctgagatcccagtctttgaggagaaaaaaaacaatggttaaaaaggcattggggaaatattttgagtttgggggtgtactttgccaccccattattggggagctgtcaccacgaatgttcccaaacttagcaacagcggcaaactactgggccaagatgagcaaccccacatttttgggatttaaagctcctgatgttataccaggatcaaccatcacactccctttgcttcgaatggcatctaccccgtaagatcttgaggggggagtgttgggtggaatcatagatccatgcactcctaacatgaactaattctcattatttaa

SEQ ID NO: 289 - DNA, 15040 bp, Homo sapiens
gagctcagccaaatccatgttgagtttagcaccatcactacccttcgggccttgtactctcacgaaggcactcagccaactgtggaaaagaaatatacacaggagactcaagaaacatcttattaatacagtatttatttgtcttttctctgtcaaaccctgagccaaccacgttccccaggctgcctggggaggtataggaaaaggaacacacggggccaaccagacgcgggagaactatgggaggtggagacggctccttcacatggcaaagaggatgagaaaggctaccatcagacaaaagagccccatggcctccgagagggcaaagcccagaatggcgtaggagaagagctgttgcttcagagaagggttcctggtagaaggagaagagaaaagactgaatttctagttcacacaaagaaaaggataaatatctaagatgggctcagggagaatccccctcttcaagattatctcacataataaagaagcttttagggtaacaccatcatgcccaaattcttgccctgattccccaaaggctctacaggaactgaatgaagggggagcaggcaatctaaaatcctgtaacatggcccaggtataatcatgaccttcactaatggttcacccatctcattaccacaaattaagacctcttggcccagacacttaatatccagggcccaaataggatggaagggtctatctagagcagtgttttcaaactttaagcagaactccaatatagtaaacatctaaaagccaaactgcaatggtacaaaagtagtggggaaattttaacggcttggtctcccctttattctctaagacagtctctggggcataacctcagaatcctaaggatttatggaacaccgctcttctagaagacaagagtaagagggacagattatgttctctcatttcaaatagtcagaagatctggggctttaagaaactacaaatgggctgggtgcggtggctcacacctgtaatcccagcactttgggaggccaaagcaggcggatcacttgaagccagaagttggagaccagcctggccaacatggtgaaaccccgtctctactaaaaatacaaaaattaggccaggcgcggtggctcacgcctgtaatcccagcactttgggaggccgagatgagtagattgcttgaggtcaggagttcgagaccagcctggccaacctggtgaaaccctgtctctaccaaaaatacaaaaattgctgggcgcagtggctcatgtctgtaatcccagcactttgggaggccgaagtgggcagatcacgaggtcaggaaatcgagaccatcctagctaatacggtgacaccctgtctctactaaaaatacaaaaaattagccaggcgtgttggcaggcgcttgtagtcccagctactcaggaggctgaggcaggagaacggcgtgaacccgggaggcagaggatgcagtgatccaagaccgcagccactgtactccagcctgggcgacagagcaagactctgtctcaaaaaaaaaaaagaaagaaaaaaaatacaaaaattagctgggggtagcggtgcgtacctgtaatcccagctacttgggaggctgaggcaagagaattgcttgaacccgagaggcagaggttgcagtgagctgagattacacagttgcactccagcctgggtgacagagtcagactctgtctcaaaaaaataaaataaaataaaataaaaaaataaaaaattagccgggcgtggtggtgggcacctgtaatcccagctacttgggaggctgaggcaggagaatcatttgaacccgggaggcagagattgcagtgggctgagattgtgccactgcacttcagtctgggagacagcgagactcagtctcaaaaaaaaaaaaaaaaaagaagttacaaatggtctatggggtttatgagttgaagtagtatggataaaggactcccagtgttgaaggcccatatataatctgtatttcccttactctgatacctccagaagtcttgatgggtaaggtaaatcgacaccaacatttaacagaatagtgaataaagcagcagtcagacttcttgtttaatacaaattcttaaaaagaactctatttctcaaaagacattaagagaacttcctggtctctagaggattaatttggttttaactgagttatccagagctgggagtactaaacagtcccaggtgtcagaaaccaggggctggctgcagtgccagttttcccaggagtgacagagggaaattcccagagatgggaaaaaatagcagtaaagccactatgttcactgagtctctagaacagggaaggtaaactttttctgtaaagggccacattgtaaataattttaggttttgtgggccgcatatagtctcttttgctttaaaacaaaaatgaagccttttaaaaatgcgaaactatttttttttttgagatggagtttcactcttttgcccaggctggagtgcagtggcgtgatctctactcactgcaacctccgccttcagggttcaagtgattttcctgcctcagcctcctgagtagctgggattacaggcatctgccaccatgcctggctaatttctgtatttttagtagagaaggggtttcaccatgttggccaggctagtctcgaactcctgacctcgtgatccgcccgcctcggcctcccaaagtgctgggattataggcgtaaggcaccacacccggccataaaattatttttagctcaatcatacaaaacctggctatggcccagatttggcccttaggccttagtttgccaacacatgctctagaccaaagctgttcatgaaactttcttcaatgacacaatgatataaacattctaatacatacatacatacacacacatatatatatatatatatatatatatatatatatatatatataaatttttttttttttgatggtctcactctgttgcccagactggaatgcagtggcaccatcttggctcactgtaacctctgtctcccgggttcaagcaattctcctgtctcatcctcccgagtagctgggactacaggcgcccaccacaacgcctggctaatttttgtatttttagcagagacagggtttcaccatattgaccaggctggtctcaaactcctgacgtcaggtgatccactcgccttgacctcccaaagtgcaggattacaggcatgaaccacctcgcccagcctatatttgtttttttcttttttttttttccccaaagtctcactctgtcacctaggctggagtacagtggcatgatctcggctcacagctcactgcaacctccacctcccgggttcaagcgattcttctgcctcagcctcctgaatagctgggattataggtgcacgccccccttacccaggtaatttttgtatttttagtagagatggggtttcgccatgttggccaggctggtctcgaactcctgacctcaagcgattcacctgccctggcctcccaaagtgctgggattagtgagccactgtgcccagccaaacattctatatttgcattgttgaatatggtagcctctagccacatctggctactgagcactcgaaatatggttagcgtgactgaagaactgaaaactgaaactatgtatttttaattaattaaaactaaaattcaggtcaagcgcgggggctcatgcctgtaatcctggcagttagggaggccgaggcaggtggatcacttgaggtcaggagtttgagaccagcctggccaacatggcgaaaccccatctctactaaaaccacaaaaattaggtgggcgtcattgtgtgtgcctgtaatcccagctacttgggaggctgaggcacaagaatcgcttgaacccagaggtagaggtgacagtgagctgagattgcgccactgcactccagcctgggaaacagagcgttactgtctcaaaacaaacaaacaaacaaacaacatgtagctagtggctacagtgtgggatagtatagttctagacccccaaatattttctgacctttggaaagcatatcagataaccagtggagggtccaacttatcttacctggcataacccaatgatgaaggctccccaaacacagtttccaatcccagccccagaaaccagccaccccaacttgtggcaagccccagcttccaattgaactttgggctgctgttgttcgatgttccctttgaaatgggcgctggttttggaagtttgcggttaaggagacaagttgaggttaagggggacatgagactgccaagcttgctgaggctctgtgaaaaagaggcaggtagaaggtaaagttttttgctttggtaacttttgtaccatttaaaaccctttaagctgccaaatcccattgtttctcccccaaacagaaaattgtttaacgccctaaaatgctggcaagtagaaccttttaacgtaggatgtagacttcaaatgcctttaagattcaggtgtggtcaagaagtgtaagactgaggccctagtctattcttgctgccccaaggagatcatcttcctaggactaaatgcttccaactgaagtcagtagactaggccaagtaataccagttagcagcagtgcacaggggcatgtgctgccagtggcaaaagctggagcactatagcatacagcgtattaagtgtcctccatctccacctaaagcccatggccttggccattcatgaattttagcctgtgatgactgtcctcagcattctacctcctggttctggcaggtaaccctccccacccatcacccccaaaaccacagtcccaactccactgtaaggtacctcatctgtcagtatctccggtcgtttcagcaccactgcagatagcggacggctcagcagctgtgaggtgctcttgacctagcaggaatgacatacaggggcaggaaggtcaaggaagactggagaggagtttcagaactatgccacgttgttacatcatcagacaagattttctttcctctcatggcctttccatcttcacatgtacgttagagttttggatcattcttccttttagcaaagtctaaattaaagaaccacaccatttctcttgcttctcagactttgctttaaggaaagaaagtctacttcctttgggccataagggagcatccaaccttgctatatccttttatagctcttgagaacaagaagaaatctaagcctcagaagcatttgcctcactcaacaagggaaatatatacagatgctcctcaacttaccatagggttatgtgccaataaatccatcatactttgaaaaaccatttaatactgctaacctaccaaacaccatagtctggccttcaatgtgctcaaaaagcttacactagcttacattagcttacagttaggtgaaatcacctagcaacacagtacaccgtagagtactggttgtttacccctgtgattgggcaggtgactgggagctgtgggttcctgctgagtattgcaacagagtattgtaccacacattgctagcttgggaaaagataaagattcctaattcgaagtatggtttctttctttctttcttttttttttttgagacggagtcttgctgtatcgccaggctggaatgcagtgtcgtgatctcggctcggctcactacaacctccacctcccaggttcaagcaattctcctgcctcagcctcccaagtagctgggactacaggcgccggcaaccacgcccagctaatttttgtatttttagtagagacaggttttcaccatattggccaggctggttttgaattcctgacctcaggtgatccacccacctcggcttcccaaggtgctgggattacaggcatgagccaccacgcccagcccgaagtatggtttctaatgaatgcatatcatttttgcatcatcataaagttaaaaaaaaaaaatcttaatctaaagttgggggccttctgtatgggtaatggtcagcccacaagaaagaagccagtaactttccctgaacacatccttttggaaaataggaacaaagattcatgctcaaaactcacctccttctggtagccttttctgactaaccccaagccagtgacaccaaaacagacacatggtgattcatagccagggctttaggcatcagataaagtgagattcaaatcttaattctattatcagcagtgtattctcaggataagtcacttaaacctttctaagcctgtattctcatttatgaaatcaaaatatcatctcttggggttgatttgaagagtaaatgagattatgtataccaattagtaaactcagtgagtgctaaggcacatggtaaatgctcaataaatggtactcctttttatttgtgaatgaaccaaccgcctcctctagctactatttcaaaaatttcttccatactgttgtttctgagtcaaatacttttccaatgtgtatttatgtaaattttagcttcctatccaaatttaagtcccagaatgaactccttagctatggctaactcaggacaagatcctacagacagtgcatactcagtccaagttatgtaatctacttatatttaccactctggatggccagcttacacgacatatagtttcaggagtaggaataacttgatcttggtctagattctcatctctattcttctcctaagatggctgggtaagaattaactgggcacagccaggcacggtggctcatgcctataatatcagcaatttaggaggccgaggacggcggatcacctgaggtcaggagttcaagaccagcctgaccaacatggagaaaccctgtctctactcggatcacgaggtcaggagtttgagaccagcccggccaacatggtgtaaccccatctctactaaaaatacaaaaattagctgggtatggtggcaggtgcctgtaaccccagctacttgggagtctgaggcaggtgaactgcttgaacccgggaggcggaggttgtggtggatcgcgccattgcagcctgggcaacaagagcgaaactctgtctcaaaaaaaaaaaaaaaaaaaaaattaactggccgccaagggatatggggcaggagagtatctagcaagcattcactctatcctgttacgcaatcatagcagagggccttccctccccaagaatctttcttacttatttacttatttatttattttttgagacagagtcttgctctgacgcccaggctggagtgcagtggtgcgatcttggctcactgcaacctctacctcctgggttcaagctattctgttgcctcagcctcctgagtagctgggattacaggcgcccgccaccatgcccaactggttttcgtttttttagtagagatggggtttcgccatgttggccaggctggttttgaactcctggcctcaagtgatctgcccgcctggacctcctctcccccagccttgctgtgaagaacaaggtctgatggaaagagagagacaagatgtctctcctttaaaactctcccagaaaagcaggtactcaccaaggagggagtggagacaaacttggagcaggcgaacattttcagggggtgaggagctgtggcaggagagctggaattacagaagcagtattgtaaacgctccttattcactaaactatatccttattagcagaaaaggggccctagaaagcttaactggcccagaaaacagtgactgaccttaagtcattggcagaaatagaattaaaaccctgaagtcatgacttcttccagaaaccccacacagctcccaagatttccttataatgaagtgacttcccctggtctgaacaagtgaacacttgggttcaggtaagacctgttacccatttccatagcctcatgatttgcagttgccacaggaattttcccagagtgtcttttgcctaagttttccttagtttttattcaaaaggaacgcttctcaagacttcatcatctggacctttaaaagttgccgtttaggctgggcacgtggttcacacctgtaatcccagcactttgggaggccgaggcgggcggatcacgaggtcaggagttcgagaccagcctgaccaacatggtgaaaccccacctctactaaaaatacaaaaattagccaggtgtggtagcacgcgcctgtaatcccagctactcaggaggctgaggcaggagaattgcttgaacccaggaggcggaggttgcagtgagacgagaccacgccactgcactccagcctgggtgacagagcgagaccccatctcaaaacaaacaaacaaacaaacaaacaaacaaaaagttgccctttagagtctttgtagttttgggagatatttgttgaaggccaagacactggaaggtctccaacaatctctttgctgatccctggaagtatctgattcctgaaaatacttcaatttcctgtattaataagatgaggaagatcaaggaggaactctgttattagtctatccaaaaggtattagtggctgggcgcagtggctcacgcctgtaatcctagcactttaggaggctgaggcgggtagatcacgaggtcaggagttcgagaccaggctgaccaacatggagaaaccccgtctctactgaaaatacaaaattagtcgggcatggtggtgcatgcctgtaatcccagctactcaggaggctgaggcaggagaattgcttgaatccaggaggcagaggctgcggtgagccaagattgcgccattgtactccagcctgggcaacaagagggaaactgtctcaaaaaaaaaaaaaaaagtattaaattgtgtctccccaagatctaaagaagatctgacaccctataggtatctaagttggtagaagtgaacttacctcaaacagaaggtgagttaaaaacctaaaggcagggtttctccaagtgaagtgagaagcccatctgaactagaattatctgggtggtgtacgtattaaaaaatgcatattcttgggcgcaacttggaccttcctggtcaagatctctgggggagctaggttcagtggctcattcctgtaatcccaacactgagaagctggggcggaaagataacttgaagccaggagtttgagaccagcctgggcaaacatcaagacctcatctctacaaaacataaaattagccaggtgaggtggaagtgcacctgtagtcccagctactccagaagctgaggcaggaggactgcttgaacccaggagctggaggcttcagtgagctatgatcacgccagttgtccagtatgggcaacaacgtgaaaccctgtctataaacaaacaaaaaagatctctgggaataaggctcaagtgccctgtatttcaaacaagtttcccagatgattattaggtatacttaacgcaagagcgtgaccctaaacccagtcttgaaactgtggtagtggtagaggatagacttgaacttggatcttttaagttacatgctttctaatatgtcacaggctgaaatactcagtgaatgcttagggctattaaataccacttcattaaatgaactgaactcagattgtcccaggttaaaacacttctgaatccaacatcttaattgctcttaatttattttttgcccaggctattgtggaactcctggcatcaaaagatcttcccaccttggcctcccagtgttgggattacaggtgtgagccaccacacccagccttaattacttttaagttaatggatgtcttcaactcttgtcctatctagaactctgatttttgcctatatgtaactctaacccaattttgctgccgtactattcaggttttcttgggtcaaaatccaatagttctttaaggcttttagaaaaagaaggggtggttcttttctaagggaattataccttattatcttctttgtaaaatgcagctcttagggggattaagtatgttcatttacaaattaacatacataaagagtttaatgtggtgctggcatataataaacccacaacaaggggtggcaattaagtgatcccaccattggctatctaaccatggcaactctgcaattgttagcctacaacttgggcaaaggcactatccagaatcaggactccaaaatcatcacgggctttttcctcagtgtagatgagtcacaggggtagtaacttaactattcctttccttaaaccttcttttccttgtaacagcagaatctggggaggttaattaatccttcacaggaaagctggcaggcagggtctcatgctggccccactagcttggccttaccccacctttctgggcctgctgcctcaacagaaaccctcatctctagcccaccatttgtgacttttacaacttcaccagcgtgccgggatgcgagaaaggtactggtaaataactagtgattccaaagcaaccagcctctctcttctgccttagctatcccaagccacaacctaacgggaggcgatgttttggctttttttcccacttctaccatgttcaaggtttactttttaaattgaggggtgctgactagagggattggtgactttagacgatccactatctccattgctcggagcacctgaggttctggggcctaaagtctggagatttcagaataaagaaggcacaagtcaggatgagaagagaaagcagagataggaggggagagcctgggggttgtcacaatctgaaagggccagagggcgagaaaagagtgtttgcagggactgggtggaacaggtgaaaagcagcactccaggatctaactttggccagctccaaggtatcctccccctgcgagacatccaagatggcgccaggcccgcgcggttggaggtcaccggcacgcggaagagccaactctaaggctaagggatagcggaagcaagaaagggcgagaggaccagggtgggagcacgcaaggtaagcgcctcaaagcatccgcgcaaggtgaggtgtcccgcgcgcgtgcgcagcgcacagagggctctaggtcccaaggccttacctgctcccactgcagagaagacagagaggggcggagcagcgggaagagcgaaaggaaggctcagcgcatgcgtgacccgggccaacgagtcgctcagccacggatagagtgattgcaacatacaggatcagctcaggcatcacagcgccgcctgccagggctgtggcggtatccggccggttgctccacctggcgttcgagaggagaaactacagggagcgccgactgcagaaatgaggccaactccgcggagtaagccgatccgtaacgtggactgcggtttggtctgtaccgcgtttgggatctcggacttgcgtcccctttccgagcatgcgcagtcgtcacactgccaaaacaaaactcctactcagaattcagtgttaacatacggtcgggattggggttcagtgcctaaaatgcagcaggaggaagatcttgggagtcctgctttctgtcgcgccgggactctggcatcactggatggcaaaccggctccatgggcgaatagtcagcaaaatgccgcagctgcttctggtggcttcgccctttcccccactccccgtttcctcctttccattccggtgataaaccatgagagaagcagcatcagcgagccagaagatagggttaaatatgatccgaatccctctttcctggctcctgggacagtctaggaataacgggcacctgcgacccgctgtaaggttgcgaggtcactccaggcttgcccgagcctctgctcaggtttcaactacgcgagttgggataagcagcgccctcccctcccgcccccatgctctcctgaacgtgggttttctctcccctttcgctcgcccttcccctgatggaaggaggtgggggaggcttcctggccctcatctttcctaggcctccttgtctcccagacaggacctgccctgccctttggaacagggcgacaaggcctatccagttccaaacccctgccgtccctgcatcgtgcttgaacgcagcacgagaaagacgggaaaagctcaccaaaccccataaaaaataaaaaataaaaagaaagccgcggctgtaaataaaggcaaatccgccactctctgaggggccgtttgtcctcccctccttggccccgtccttcccgccgccccctcccggctcccgggccccgcggcgccccggccccgagctcctccatttaatcggatttgggagaaggggaggataaatcacggcagcagctttacggtcccggaggagaggcgagccgcagacaggcacaccccggccggcgataaaaaccgccgctgaaagcccacggagcaatttcccgggaccccgagcgacgccattacaggaatgtaattttgcccggatgaggccccgagtttaattatcctcgcggaggaatttcaatgcggccaatccatcttgcaggcgggcggcagagggatttatatgggcccgttatttcacaccgatcctccatctgcatttttatggccctgagctcctgaaagggaggggaaggagtggggagaaataggagaagcgggcgagaagaggagggtggtagactgcctgtctttcctaaattcgcatttccagctccatcaggattctcacaggttcctctgaaatccccaaatctccagttttagttgttgattgcgccccgagcgggcaggtacgtgggaaatggaactgggatctttgggaatcaatcaacaggtatttatcaagtaccaagtggtgccaggcactgtggagatgctgttaggagaaagacaggctagcaaagacacaagtttatcccctgaggtctccagacatctccattcccaccaaaacggaattcttttaagctgtcagcttcacatcctcagtggcagagaaagtccacagttcttaggagccaccacccccaaacggctgttgcagctgttgcgacaatttagacactcagatatggctaacaatcccagaggaggatcagagaaggggcctgggaggaagctaaagctggctctttccaaaagttgttacagcctgcgatgtttaacactcccttgccctcatagaataatgggttctgcgttcagacaaatctgggttcccaaattgctgtgtgatcttgagctagctgtttaaccccctctaaatctatttcctcctatgtaaattgagaagaataatagtacttatcacacagccaatattgggataatacatatgaagcttttagcaaggtacttggtacccagtaagagttcagtaattgctagcattaaaatcatcatcgtcaccaccaccaccaccaccaccaccatcaccaccatcatcaccatcatcatcactgcttctatagttaagggcattgcaactcaattctgcactgctacctatatggactgtttattgcaaggtccttgagatagtatctcctgaaagagactcaactacactttaaaaacgttttcacctgcataagtcatacaaaacaagttattttacttgctggtgagtggagatctgaggggaggctgagaatcctgggactattactacgaggcttgaagcaagaaatcaaatccgcaagggagcagtgaggctccaaaaaggaggtttgtaaggggaggggtgaatttgaagacagcaaaagatccaagagaagcttagctgagggtcggaggatcttcttaactataggcttggggaagggtccttctttcacttcacaaagggaaaaccggggtccaggaaggaaagggtgtggagacagaactatcctttccaatcagtccctttcttttcctaccagaccatataacaaggttggactgattggccagtttttttaatgactgtgagtggcagattctgactggttggcagcctccctgcccagtggtgacgaagaaatgagattgatctttcctttcttaggattggttaacaaccctcaggggggccacagactcattttaattgactggataggctaagagagaggttcagcttctctcatatagaaattccaagtgtccttttctacaaaggtcaccaaggaagggttttgatttgtttatatatgtttctttggacaagaaaccatagcttagagcagaaaaatcaagatactcatgcaggcatgccacaatgagaaagagccacgaaagaaacaggagtgattttaaaaacgagagagagagagagagagagagagagagagagagagagaccagggcacagagaaatgcgaagaaaaaatattgctagagagaagaggaagggtttaaatggtttgatttccattcctgatggcttaagatgaggatactttatgatgtgttttgctagatgcacatgttgccagcaagtggcatggatagaacagctgtcttcgaggcaggagactggagtctagtcctagccctgctactaaatagttgaataactatgctagttacttcatctctcgaagctttagtttcctcatttggaaaaatcagggagagaagtaggtgatctctaagatttcatccagtgttaactttccaggattttctttctttctgctaaacaggcacttttctgcaagttaaagtggaaactttgcactgccaatactttatacatattgagcttctctatttattagtgattgttaatttcaagctcctgggctgtgatgggctggtgggaactgactgatatattttctacttttccttgctaaatcaattccctaagacatcaggactgtgagacatcggtaaacctccctacttctaaagaaagaaaacagtagatgaaggaagggaaaggatcactggtatccaggcttctgagggaggaatcagtaggagagatggtggcagagggatgaccaaaaacatttttgctggggaagaacttcaccttcctttgaatttgtttattttttaatttattttattttttggagacagggtcttgttctgttacccaggctggggtgcggtgacacgatcatggctcactgcag

SEQ ID NO: 290 - DNA, 4871 bp, Homo sapiens
tttcgtgctgctctcgcgatatttgcgcgagcctgcttccttctttcctcccttgccagtctgcctgtcttcctccccgtcttccctgcccggcctcccccttcttcccccgctggccccctccccggagggataatatggtctccggcgatggacgccccaaaagcaggatacgcctttgagtaccttattgaaacattaaatgacagttcacataagaagttcttcgatgtatctaaacttggcaccaagtatgatgttctgccttactcaatacgggtcttgttggaagctgctgtacgaaattgtgatggctttttaatgaagaaggaagatgttatgaacattttagactggaaaaccaaacaaagcaatgttgaagtgccctttttccctgcccgtgttcttcttcaagattttactggaataccagcaatggtggattttgctgctatgagggaggcagtgaaaactcttggaggtgatcctgagaaagtccatcctgcttgtccgacagatcttacagttgaccattctttacaaattgacttcagtaaatgtgcaatacagaatgcaccaaatcctggaggtggtgacctgcagaaagcaggaaagctctctccacttaaagtgcagcctaagaagcttccctgcagaggccagactacctgccgaggatcttgtgattctggagaactaggccgaaactcaggaacattttcttcgcagattgagaatacacccatcctgtgtccttttcatttgcaaccagtgcctgaacctgaaacagtgttaaaaaatcaagaagtagaattcggcagaaatcgagagaggcttcagttttttaagtggagttcaagagtttttaagaatgtggcagggatccctcctggaactggaatggctcatcaaataaacttagaatatttgtcaagagtggtttttgaagaaaaagacctcctcttcccagacagtgtagtcggcacagattcacacataacgatggtgaatggtttagggattctggggtggggggttggaggcattgaaacagaagcagttatgcttggtctgccagtttctcttactttaccagaggtggttggatgtgagttaactgggtcatcaaacccttttgttacatccatagatgttgttcttggtattacaaagcacctcaggcaagtaggagtggctggaaagtttgttgagttttttggaagtggagtttcacaattatctatagttgatcgaactacaatagcaaacatgtgtccggaatatggtgctatcctcagctttttccctgttgacaatgtgacattaaaacatttagaacatacaggttttagcaaagccaaactcgaatcaatggaaacataccttaaagctgtgaaattgtttcgaaatgaccagaattcttcaggagaacctgaatactcccaggtgatccagattaatctgaattcaatagttccatctgttagtggtccaaaaagacctcaggatagagttgctgtgacagatatgaaaagcgatttccaggcttgcttaaatgaaaaggttggatttaaaggcttccaaattgcagctgaaaaacaaaaggatattgtctccattcattatgaaggaagtgaatataagctgtctcatggatcagtggtcattgctgcagttatcagttgtaccaataattgcaatccatctgtcatgcttgctgcaggtcttttggctaaaaaggctgttgaagctggtctgcgtgttaaaccttatataagaacaagtttatctccaggcagtgggatggttacacattacctcagttcaagtggagtattaccatatctaagtaagcttggatttgaaatcgttggctatggatgttcaacttgagtgggaaatacagcacccttatcagacgcagttttaaatgcagtaaaacagggtgatttggttacctgtggaattttatctggaaacaaaaattttgaaggtcgtctttgtgattgtgttcgtgccaattatcttgcctctccacccttagtggtagcttatgccatagcaggcacagtgaatatagattgccagacagaacctttaggtactgaccccaccggcaagaacatttacctgcatgatatttggcctagtcgagaagaagttcatcgagtagaggaagaacatgttatactatccatgtttaaagcattaaaagataaaatagaaatggggaataaacggtggaattccttagaagcaccggattcagttttgtttccatgggacttaaagtctacttatatcagatgcccttcattttttgataaacttaccaaagagccaattgcactccaggcctattgaaaatgcccatgtcttattatatttgggagactctgtcacaaccagatcatatatcacctgccagaaagtatcgctaggaatagtgctgccgctaagtatttgacaaacagaggccttacccctcgtgaattcaactcttacggagctcgaagaggtaatgatgctgtaatgacaagaggcacttttgcaaatatcaagctttttaataagtttattggaaaaccagctcctaaaacaattcattttccatcaggacagacgctagatgtatttgaggctgcagagctgtaccagaaagaaggtatcccactgattattttagcaggaaagaaatatggttcaggaaactccagagactgggctgccaaaggaccgtatttactgggtgtgaaagctgttttggccgaaagttatgaaaaaatacacaaagatcatttgattggaattggcatagctccacttcagttccttccaggagaaaatgcagattccttgggcctctccggtagagaaacattttctttaacatttcctgaagaactgtctcctggaattacattgaatatacagacaagcactggaaaagtattcagcgtgattgcttcgtttgaagatgatgtggaaataacattatacaaacatggaggattattaaactttgtggcacgaaaattctcatagtatctacttaccatagatacctttcataactggtaactgcaaagccttttgtgctggacccaggaatccttaccatggagcagcagatagtcccagtatactcacttatctcatccatggatgtaaatgatgatgaatcaacatagtaactgaaatgaaatcttcttgattttaaataatatacgaatggtgctattaatattgctaaaatcaacgtgtgaagtgtgttgtggaagagacctgtaagtatgggggggggcgatattttatcagaccattttgtaaataaaggcagaatttgtgttgaagattcttatatgaataaccttcctggatttgtttagttttgcaccaataaaactgtgtactactgtttgttggtttaagagtagcagattgaaatataagaagccagattagactctaaaattgtggccattgggaatctcatttataaatggaccttttaagtatattaattcctcttcagaattgagctgggacacatttgggcattcttagtttgtcatataaccaggtttatccttagtctaactgcaagggatagaacctgccccaggtcaccaatccattctggtccaatcccagcccaaggttcccttcccacatatgaagatggaccatggcaggatacaactgattgtgtggcaccatgtattagcagtgggaatatgtatcacatatgatgcagcctttcatatttcagcagtttgccactgtgactgtctggcaagcccccagatggcgttatattaattggattagattattttgctcaccttatgtaatactgtaacttcctataacctaatattttcggtatcattaaccaaaatttcacactcatagttgctaaagagaatgttattcaatcattaaactctgaactgatttcttctatacatttaaattatccaccctcaataatacgggtgctcaaccctatgcattttttaagtgttgctatttcttaattaaattgatttcctgtcattttgaatcatttatcacctgcgatgcatgattctattaattttgttatgttactgttttaaccaaagctgaccgtaaggataaaacacttaagttgttgctgagtactatatatcctcaatatgcatgtctgcccatcacatcaaatgttctgtcaacaagatgtttggtaattttttttaaaaaggttggaaaattaattatagaaggttctatactgtttttttaattaagaaactaaatctagcaggctaaaggttaattgtagtgattttttttcacatagatatctttctatgacctagttagttactgcaattcagaattagttcacattgcataaagaattacttgttgtaagcaaaatgctgaaactaccaaaccagtggatgaagaccactaagaactttgcacataatcatacaatcttttgaaaatattttgcaaatatgtgtttagacaataagatggactagagttcgacaaaatgatttctttatttaaattttgtataagtattttcttcgacactttcaaattatattgtgttcttgatatatgctgtatatttatttgttagtgcatgtgtttttaatttacatgaaaacatgagttaggagaaattacaggttgaaagatgaaatgcctgtatgtgctctgaagaaatggtaattccagattgtgcagggggaaacaaatctattttgttttgttttgttttttgagacggagtcttgccctgtggctgggctggagtgcaatggcgcgatcttggctcactggcacctccgcctcccgggatcagggtattc

SEQ ID NO: 291 - DNA, 1646 bp, Homo sapiens
cggacgcgtggggaccaccgttatgtattaggagattttagttaggatatttagaaagaaaaagagaatctgccattccttttcttctctcttcaacctcagtacctccaaatcttggctgcatggaagtatctttggtgacatcaactcttctccaagtgaagacaactggttgaaggggaccaggaggttggacacagaccattgcaatggaaatgcagatgatttagactgttcttctctgactgatgactgggagtcagggaagatgaatgcagagtctgtgatcacctcctcttccagccacatcatatctcagcctcctggaggaaactcccatagcttgtctcttcagtcccagttgacagcttctgaacgtttccaagagaatagttcggatcattcagaaaccaggttgttgcaagaggtcttctttcaggcaatcctgcttgctgtgtgcttaatcatttctgcatgtgcaagatggtttatgggagaaatattagccagtgtcttcacatgctcattgatgataactgtagcttatgtgaaatcattgtttctcagccttgccagctatttcaaaaccactgcctgtgctcggtttgtcaaaatttgacaaccatttaggaatgccttcgatgaatgtcctccatctgaatatctggaaattgtccaacttgcagtctacttggaatcaagtgttttattggaagggagtaagcgagtaatggagaaaaagccattttagtttgactatgtgattttaaaatgatctcaggtttttccatcaaaattataatatgctcatgaaaataatattaatttgccttccctttgcaaacaccggcagttgaaaggaaaaggacggggaatgtgatggaaaagagaccgcctggaataaatgtccccctatgattctttaaggcagtggttctcgagcttgaattttcattaggaaattctgtgaggagcttgtaaccagatttctgggtctgccacatgcacctatctcttgctgaattgctttaatagaataatgagagcaagtttgtctaactaataccaacctgacaacttgaataacaataaatgcaatttggtacataaattataatgctgcaaaagtttgtcattcacctcagtggagtgacttgatattaggtggtaacccgtagatgatggttaatatgaaaatggacaggaaagaagcattttctgaaagttatattcttttgaaccacgttctaaacccaagtttttaatcttcttggggctcgtaattacctttcactttaatgtcacttaaagatataacacagaaaaatgccttgagggcaaaatataggcaaaacaccaatgcgctttcaaatgcatgaaaatggtgcagttgtacccttgagccttgactcaagggctgtagatgttccctttccaccccccacacttggtgcgtgttcacaaagcaaatatggcctgtaattcaaatttgttctatgtgatactctctgagtaaaaactcatacatgcagaaaattgtctttgctcgaaatgataatgccaaaatataactttatatataatttgcatttagtacatttttggttaaaaaataaactaataaataagtgaagtcatcagcaaaa

SEQ ID NO: 292 - DNA, 1646 bp, Homo sapiens; identical to SEQ ID NO: 291

SEQ ID NO: 293 - DNA, 1646 bp, Homo sapiens; identical to SEQ ID NO: 291

SEQ ID NO: 294 - DNA, 1902 bp, Homo sapiens
gttccacctggcggctggctctcagtcccctcgctgtagtcgcggagctgtgtctgttcccaggagtccttcggcggctgttgtgtcagtggcctgatcgcgatggggacaaaggcgcaagtcgagaggaaactgttgtgcctcttcatattggcgatcctgttgtgctccctggcattgggcagtgttacagtgcactcttctgaacctgaagtcagaattcctgagaataatcctgtgaagttgtcctgtgcctactcgggcttttcttctccccgtgtggagtggaagtttgaccaaggagacaccaccagactcgtttgctataataacaagatcacagcttcctatgaggaccgggtgaccttcttgccaactggtatcaccttcaagtccgtgacacgggaagacactgggacatacacttgtatggtctctgaggaaggcggcaacagctatggggaggtcaaggtcaagctcatcgtgcttgtgcctccatccaagcctacagttaacatcccctcctctgccaccattgggaaccgggcagtgctgacatgctcagaacaagatggttccccaccttctgaatacacctggttcaaagatgggatagtgatgcctacgaatcccaaaagcacccgtgccttcagcaactcttcctatgtcctgaatcccacaacaggagagctggtctttgatcccctgtcagcctctgatactggagaatacagctgtgaggcacggaatgggtatgggacacccatgacttcaaatgctgtgcgcatggaagctgtggagcggaatgtgggggtcatcgtggcagccgtccttgtaaccctgattctcctgggaatcttggtttttggcatctggtttgcctatagccgaggccactttgacagaacaaagaaagggacttcgagtaagaaggtgatttacagccagcctagtgcccgaagtgaaggagaattcaaacagacctcgtcattcctggtgtgagcctggtcggctcaccgcctatcatctgcatttgccttactcaggtgctaccggactctggcccctgatgtctgtagtttcacaggatgccttatttgtcttctacaccccacagggccccctacttcttcggatgtgtttttaataatgtcagctatgtgccccatcctccttcatgccctccctccctttcctaccactgctgagtggcctggaacttgtttaaagtgtttattccccatttctttgagggatcaggaaggaatcctgggtatgccattgacttcccttctaagtagacagcaaaaatggcgggggtcgcaggaatctgcactcaactgcccacctggctggcagggatctttgaataggtatcttgagcttggttctgggctctttccttgtgtactgacgaccagggccagctgttctagagcgggaattagaggctagagcggctgaaatggttgtttggtgatgacactggggtccttccatctctggggcccactctcttctgtcttcccatgggaagtgccactgggatccctctgccctgtcctcctgaatacaagctgactgacattgactgtgtctgtggaaaatgggagctcttgttgtggagagcatagtaaattttcagagaacttgaagccaaaaggatttaaaaccgctgctctaaagaaaagaaaactggaggctgggcgcagtggctcacgcctataatcccagaggctgaggcaggcggatcacctgaggtcaggagttcaagatcagcctgaccaacatggagaaaccctactaaaaatacaaagttagccaggcatggtggtgcatgcctgtaatcccagctgctcaggagcctggcaacaagagcaaaactccagctcaaaaaaaaaa

SEQ ID NO: 295 - DNA, 448 bp, Homo sapiens
gactactagtccagcgcggtggaattcgtcgggaagggtatcaaggaataacaccctattgtgggcttgcggagaatgggggacttcaaggcgtgtcagtttcaggagggtgagggcaggagcgtgggtggagtcagcaggtccccatgatggccctcactgagagcttcgcccttgtctcctacaagctctgactccattcccagtgggcacccagcacctccaacccctccacagcccccaacccagcctctgtcggaggcgaattctcagagtgagggttccctgtcacttgagagaaggttccctgtgacgtgaccttgggggacgtcattgccctttctgtccccacccaccccctcggcagttctgttggccaggactttggcctatacaaaggatgggggttgtggctgtggagcggaactggttctcacccctattaagg

SEQ ID NO: 296 - DNA, 675 bp, Homo sapiens
  misc_feature (1)...(675): n = a,t,c or g
cgtccgcccacgcgtccggccgctccggctgcaccgcgctcgctccgagtttcaggctcgtgctaagctagcgccgtcgtcgtctcccttcagtcgccatcatgattatctaccgggacctcatcagccacgatgagatgttctccgacatctacaagatccgggagatcgcggacgggttgtgcctggaggtggaggggaagatggtcagtaggacagaaggtaacattgatgactcgctcattggtggaaatgcctccgctgaaggccccgagggcgaaggtaccgaaagcacagtaatcactggtgtcgatattgtcatgaaccatcacctgcaggaaacaagtttcacaaaagaagcctacaagaagtacatcaaagattacatgaaatcaatcaaagggaaacttgaagaacagagaccaganagagtaanaccttttatgacaggggctgcagaacaaatcaagcacatccttgctaattcanaaactaccagttcttattggtgaaacatgaatcagatgcatggntgtctatggactaccggaggatgtggacccataatgatttcttanggatgttanaaaggaanatgtaacaanggtgcattatttggactatactgcatatactggtttgctgtctccccacaccgggcttagacaatggatg

SEQ ID NO: 297 - DNA, 436 bp, Homo sapiens
gggtgcccagaggatgcgacatcctcatcgtctacagcccggatgccgaggaatggtgccagtacctgcagaccctgttcctgtccagtcggcaggtccgcagccagaagatactgactcacaggctgggccccgaggcctccttctcggcagaggacctaagccttttcctcagcacccgctgtgtcgtggtgctgctgtccgcggagctggtgcagcacttccacaagcccgccttgctgcccctgctgcagagagctttccatcctccgcaccgcgtggtcaggctgctctgcggcgtgcgggacagcgaggagttcctagacttctttccagattgggcccattggcaggagctcacctgtgacgatgtatgccttagacctacgtggcagctgtgaaaaaagccatttccgaaggtaaggatttcttctaa

SEQ ID NO: 298 - DNA, 975 bp, Homo sapiens
gtccagtgtggtggaattccgccgccactgtccggccacagcctaacgctcttcgctgtcgtttgcggtctcgcgcagggcggccccggttctggtgtttggcgtcggaattaaacaaccaccatgtcgagcaaaaaggcaaagaccaagaccaccaagaagcgccctcagcgtgcaacatccaatgtgtttgccatgtttgaccagtcacagattcaggagttcaaagaggccttcaacatgattgatcagaacagagatggcttcatcgacaaggaagatttgcatgatatgcttgcttctctagggaagaatcccactgatgcataccttgatgccatgatgaatgaggccccagggcccatcaatttcaccatgttcctgaccatgtttggtgagaagttaaatggcacagatcctgaagatgtcatcagaaacgcctttgctcttgctttgatgaagaagcaacaggcaccattcaggaagattacctaagagagctgctgacaaccatgggggatcggtttacagatgaggaagtggatgagctgtacagagaagcacctattgacaaaaaggggaatttcaattacatcgagttcacacgcatcctgaaacatggagccaaagacaaagatgactgaaagaactttagctaaaatcttccagttacattgtcttactctcttttacttctcagacacttcccccaccctcatagaacctgttgcatgcaacttagtttcacagctttgcctcttctttttgatgtatttattccagacctttctgccactttagcacttggtataatcagactgggaaatgggggatgagggtggtaaattgtattgaaaaagatcgcgaataaaaatcaacaaagtgtgaaagcccagaaaaatatattcgtatttcctgggttttgctgggatttttacatttttatataataaaaatgttattttgaaaaaaaaa

SEQ ID NO: 299 - DNA, 777 bp, Homo sapiens
agggtacagagggcaaggggagctaacggtgctcaagcccacaccctacatcctcacatcaaccccctgaaggagtgtccagcacagtccacagcctccctgggcgattctgggttcctggctgggccacccagagccaggactgggctccaggtgcagccaaggtgctgtccctgcctcgatgtcccccattatcttccccagactacaacacggtgcagactgtgggcatgactctggcaaccatcttgttcctgctgggtatcctcatcgtcatcagcaagaaggtgaagtgcaggaaggcggactccagcccaacctgcaaatcctgtaagtctgagcttccctcttcagcccctggtggcggcggcgtgtaacaccttcccgaggaaactccgctgccgaccctgcctgagcgcgggagcctgaggaccgggtggaggcggtggggacccagccgcgcgccgggagcgctccccggaatgagccgccccacccaccccaaggctggagccgctgcaccctgctgtccctctccaggccttggcaatgacgatcccccaaagagcccgtctgcaccccagacccagggcctcaggcctccagctcctgggatccgggagtccatcccggcccagcacccccagcatccccgtgtatggcccccctgcacctccttgtctcatccccgaagatccgtccccctggcccctcagtgtccatgtcttgagcttaataaatgtgcatttggttttttcctttgaaaaaaaaaaaaaa

SEQ ID NO: 300 - DNA, 612 bp, Homo sapiens
  misc_feature (1)...(612): n = a,t,c or g
aacagacagtggcatattcaccccggtccaaactcggaacactgctgccagaatttcccaatgtcaaagatctaaatctgccagccagcctgcctgaggagaaggtttctacctttattatgatgtacagaacacactgtcagagaatactggacactgtaataagagccaactttgatgaggttcaaagtttccttctgcacttttggcaaggaatgccgccccacatgctgcctgtgctgggctcctccacggtggtgaacattgtcggcgtgtgtgactccatcctctacaaagctatctccggggtgctgatgcccactgtgctgcaggcattacctgacagcttaacttaagtgattcgaaagtttgccaagcaactggatgagtggctaaaagtggctcttcacgacctcccagaaaacttgcgaaacatcaaggtcgaaatgtccgagaagggtcttccaaatctgagacggcaaacatcacttaatcatctctggcaggcatcttcgaaaagtgattcacagtgcagacatcacgtttcaaatgctggaagantgggagaacgtggacctggacagcatcaccaagccaaccctttacacccat

SEQ ID NO: 301 - DNA, 1355 bp, Homo sapiens
atgcctggcacatgtaagtgcacaggagctgaggccagcaggatatggaagggagaggacgtctgcgagtactgggggcagagggtggttgcattcttggcaatggtcatgggaacccacacctacagccactggcccagctgctgccccagcaaagggcaggacacctctgaggagctgctgaggtggagcactgtgcctgtgcctcccctagagcctgctaggcccaaccgccacccagagtcctgtagggccagtgaagatggacccctcaacagcagggccatctccccctggagatatgagcctgacaagtgccgcccccacaggttggacagagacttgaaccggctcccccaggacctgtaccacgcccgttgcctgtgcccgcactgcgtcagcctacagacaggctcccacatggacccccggggcaactcggagctgctctaccacaaccagactgtcttctaccggcggccatgccatggcgagaagggcacccacaagggctactgcctggagcgcaggctgtaccgtgtttccttagcttgtggggctgtgttggtgggccctacgaagatgctcagtgctcgagatcgccgggaccggcaccctgaggagggggtagttgcagagctccagggcttcgcggtggacaaggccttcctcacctcccacaagggcatcctgctggaaaccgagctggccctgaccctcatcatcttcatctgcttcacggcctccatctctgcctacatggccgcggcgctactggagttcttcatcacacttgccttcctcttcctctatgccacccagtactaccagcgcttcgaccgaattaactggccctgtctggacttcctgcgctgtgtcagtgccatcatcatcttcctggtggtctcctttgcagctgtgacctcccgggacggagctgccattgctgcttttgtttttggcatcatcctggtttccatctttgcctatgatgccttcaagatctaccggactgagatggcacccggggccagccagggggaccagcagtgactctggggctacctggctcctaggcccagccagccagagaggacagtggagcccagacacgtctcccttgggattcactagcccccagcccgccaaaccccaccccagccctacacagcagtctggcctgagacgtcactggggacttatctgtggagcctggtgctccaggatgtggcttctcatgaagctctggccagaggaggggaacttattgggggagggggggtggaggggaggaatctggacctctaagtcattcccaaattaaaatattcaaattctaaaaaaaaaaaaaaaaa

SEQ ID NO: 302 - DNA, 621 bp, Homo sapiens
  misc_feature (1)...(621): n = a,t,c or g
tcccgatattcccgggtcgacgatttcgtcgccgagcccagctccgccgccgagcgcctgtgccggcacggctacaccatggagcgcccggataaggcggcgctgaacgcactgcagcctcctgagttcagaaatgaaagctcattagcatctacactgaagacgctcctgttcttcacagctttaatgatcactgttcctattgggttatatttcacaactaaatcttacatatttgaaggcgcccttgggatgtccaatagggacagctatttttacgctgctattgttgcagtggtcgccgtccatgtggtgctggccctctttgtgtatgtggcctggaatgaaggctcacgacagtggcgtgaaggcaaacaggattaaagtgaacatcacctttttatagcattaaattcattttttaaaatgataaatgctggagggggccatctgatttgaataaagttgaaagaacatgttaaagtcagtcttaaggagtcacgtttgagtatgtaaattttgatctttctaatatgttggttgnaaaatcagttttaactgtatgaatctganttgcnatgagaattggaaagtagtacnagaataggtaattaatggcca

SEQ ID NO: 303 - DNA, 406 bp, Homo sapiens
ggaaagctgatgtgaaaaacctttctgggaaaaacagacctgtgaattcaaaaatacatgatatttttaaaggatgggctcttcaaccacttgatccagatggccgagtaaaaatttgggtttatggcgtttcaggtggcgcttttctcatcatgattttcctaatatttacttcctaccttgtttgcaagaagccaaaaccacatcaaagcacacctccccaacagaagcctctgaccttatcctacgatggagacttagacatgtaatctgaaaaagaaatccaaatgtagacatcaactgccttaaccgctttctcttttgtagctctcagacttctcagttttttgaggaatctcaagatgtgatatattgggcagaatacaaatattgcaaaagtaatatt

SEQ ID NO: 304 - DNA, 1023 bp, Homo sapiens
ggacggtcaagtgccaaggtttgcatgcttcaggtcgacttttaaagaatccttgtggaaagagtcagaaaaagagcaagagagcttgattcggaggccgtgcctctcagagtggcctcccgatccttgaatcggagcccgtgcctatcagcctggcctcctgatccttgaatcggaggccgtgcctctcagcgtggcctcccaatccttgaatcggaggccgtgcctctcatcgtggcctcccgacctagcatggtggagagcgccccctgccggtagatcctgggccggcacactgagagcggcaggccccgccggaggggccagcgcaggaccggggagaatggagctcacccagtgcctagccctgcgtttactctcagtttcctgctggagagcaatgcctcaaactacacagtccggcggaggcgagtccgccagctctggaagcctctgaggcacagacgaggaaagcgcctgaatgtggatctggggtaccagaagttgccggtggctcttgcccctgtcttcttctttgccttccaagacaccaagctgttcccacccaaggtcctggcacttactctccctgcacctcacaccagccccacatcttcccaaggccagctgctccccatcacctgggtctcctccaaaacccgcacaatgctgcatcctgcatccagtgcctatatcccgctggggtggccaccaccatgcccaggagaaaggctgaaggggatgctgaaggagataagccaaggtgaaggacgaaccacagagaaggcccgcaaagttgtctgctaaacctgctcctccaaatccagaggccaagcctaaaaatgcccctggggtcacactgtcacttcgtggaactgccacaaggttctgaccctgaagggtccacacttgctgattcaaatcattaatagtcccagtaataggtttacacaccaacgtagatggaatgatgtgcatggacatggccgaaagcctctgctcctccacatagcccaagcccat

SEQ ID NO: 305 - DNA, 1799 bp, Homo sapiens
gttaattttggttccttaaaacgcccccccccttttttttttttttccttccttttttttttttgcgagacagggtctcactttgtggctcaggctggagtgtactggcacgttcttagctcactgcagccttgaactcctgggctcaggcaatcctcctaccttagcctcctgagtagctaggactacaggaatgtgccatcatgcctggctaatttttaagttttttgtagagatgggatctcactatgttgcccaagctggtttcagattcctgtgctcaagggattctgctaacttggctccccaaagtgctgggattacaaatgtgagccactgtatctggcccatattcttttttaagaaaagatgcagaggtgttaaatattaatatcaaattgtccaggcatggtgtttatgaaattgtgtgccctctgacaggcaaccaaacacacacgacttcatttctttattaattcctgcctcatcatcttttctcattgatgctccttaatgtcaaaggaatctctctctctcacacacacataagaccaaaacaaatatcttgaacatgcaaaaaaatagtctacgcttttgaatagtgtgcactgttgaatagtgtgcactgttggatagtgtgcactgttgaagtgtgatgtgcctaaggcaacaggatcttgggaaagctctagatttttggcttcgaaataaaactgcatgttgaatagcaggtttttacatttattattgttgtgtatttcctcccctttttgcaatactatctacgctgagttatctattgccaactagcaccaattctccaaatcaaagtgtgtgaggaaaacacactcgtgcaatcctctttaacagaagatacaccaagtaacctgtctgtctacttctgttacccagaaataaaagaacttgaagggctgcttggctgggagggggtcccgggtggggaagaggcatcctgccctcagtcgggaatccatggtgaacagctggatgtcctgtggattccagtacagggccgactggctgagttgtagacaagagaccagacataggggataaaaaactcctcgggctgctcctcttccacatatttgaatttcaattctggaaatttcttcagtctgtctttgggcagcgcaacgacgccttgcttaatgatttccaggacccgttccactgacagctcagctccagcttgcagcaaccttgagctaaagaaggagatcaccagatcaatattttgcattatatcctgaaatgaaggatgagttcgaaattgttcaaagagatcgcgtttgtaaagcagggcgtataccaagtttgggttgtggtgaagggaatttgtcaggcaggagttgatgatctctaacatcattcgaatcacttcttcaatgacatttaggtcttgtgcataatctggtagaggaacatcattagaactcagcgaacctctcaaggactgtgtggcttgttccagaactttgttgtgttttttagacagcaaagaaaataaactgatgatcctctgggcagcatactgatggagagaacgaaactgtgccgacatatttgctaaagctgccaaacaatttgtgtcaaggtacttgtctcgtgtcctagtcatgttgtattgaatggttcttattaccaccaggatcaggagactccccaaggagatttcagttaaaactcgttctgaataccaagtaatattttttagtatcacttcatgaatggatctgttgaagccatcatcttccgtaaggatcaacaatattata

SEQ ID NO: 306 - DNA, 449 bp, Homo sapiens
cagtgtggtggaattcacggtctgccacaccagggggccatagtgccgacaggggagcagcctggggtggcagcccaaggccagctgctgtttgttttcctctgatccttgtggaaggcccaaaaggatcttttgtgactggcctaaaatctgccaggctggactgtgctgttcctctctgtcctggggctcctggcctcccgggctgtgtccgcactcagcagcctcttcgcggccgaggtcttccccacggtgatcaggggggccgggctgggcctggtgctgggggccgggttcctgggccaggcagccggccccctggacaccctgcacggccggcagggcttcttcctgcaacaagtcgtcttcgcctcccttgctgtccttgccctgctgtgtgtcctgctgctgcctgagagccgaagccgggggctgccccagtcactgca

SEQ ID NO: 307 - DNA, 2083 bp, Homo sapiens
  misc_feature (1)...(2083): n = a,t,c or g
ggaattcccaggacccacagcggctgcaaaggaaacctaaaggcaatactagctccatttcaagaaccgaacaggaaatattccaagtagaattaaaccttcaaaatgcttctctgaatcatcaagggattgacaaaatatatgactgccaaggtttactgccacctccagagaagctcactgccgaggtcctaggaatcatttgcattgtcctgatggccactgtgttaaaaacaatagttcttattcctttcctggagcagaacaattcttccccgaatacaagaacgcagaaagcacgtcattgtggccattgtcctgaggagtggattacatattccaacagttgttactacattggtaaggaaagaagaacttgggaagaaagagtttgctggcctgtgcttcgaagaactcttctagtctgctttctatagataatgaggaagaaatggtatgtgtggggacttcccagttggctgtaagttgccatttgaactaaacgaaatagatcaggaactgaggacatatctaaattttctagttttatagaaggcttttatccacaagaatcaagatcttccctctctgagcaggaatcctttgtgcattgaagactttagattcctctctgcggtagacgtgcacttataagtatttgatggggtggattcgtggtcggaggtctcgacacagctgggagatgagtgaatttcataattataacttggatctgaagaagagtgatttttcaacacgatggcaaaagcaaagatgtccagtagtcaaaagcaaatgtagagaaaatgcatctccattttttttctgctgcttcatcgctgtagccatgggaatccgtttcattattatggtagcaatatggagtgctgtattcctaaactcattattcaaccaagaagttcaaattcccttgaccgaaagttactgtggcccatgtcctaaaaactggatatgttacaaaaataactgctaccaattttttgatgagagtaaaaactggtatgagagccaggcttcttgtatgtctcaaaatgccagccttctgaaagtatacagcaaagaggaccaggatttacttaaactggtgaagtcatatcattggatgggactagtacacattccaacaaatggatcttggcagtgggaagatggctccattctctcacccaacctactaacaataattgaaatgcagaagggagactgtgcactctatgcctcgagctttaaaggctatatagaaaactgttcaactccaaatacatacatctgcatgcaaaggactgtgtaaagatgatcaaccatctcaataaaagccaggaacagagaagagattacaccagcggtaacactgccaaccgagactaaaggaaacaaacaaaaacaggacaaaatgaccaaagactgtcagatttcttagactccacaggaccaaaccatagaacaatttcactgcaaacatgcatgattctccaagacaaaagaagagagatcctaaaggcaattcagatatccccaaggctgcctctcccaccacaagcccagagtggatgggctgggggaggggtgctgttttaatttctaaaggtaggaccaacacccaggggatcagtgaaggaagagaaggccagcagatcagtgagagtgcaaccccaccctccacaggaaattgcctcatgggcagggccacagcagagagacacagcatgggcagtgccttccctgcctgtgggggtcatgctgccacttttaatgggtcctccacccaacggggtcagggaggtggtgctgccccagtgggccatgattatcttaaaggcattattctccagccttaagatcttaggacgtttcctttgctatgatttgtacttgcttgagtcccatgactgtttctcttcctctctttcttccttttggaatagtaatatccatcctatgtttgtcccactattgtattttggaagcacataacttgtttggtttcacaggttcacagttaagaaggaattttgcctctgaataaatagaatcttgagtctcatgcccaanaaaaaaaaaa

SEQ ID NO: 308 - DNA, 641 bp, Homo sapiens
attacgccaagcttggcacgaggctactgccctcactggacttggggggtctggacctttggcccctgccccctgggggacccagacctctgggccctcacttctggcccttacagagatccaggcatccaacacccccatccctgcccaagcgtctgaggtgttagtggtggggggagaagcccaccatcccagactctggtaaatgtctttgctggttccttgcagctggcagtgggggggaccccagcccaggcccaggcctaggcctggggtggggatagggtcagatgaagaattcctctttcctcttgtgtccgtcgctgccattgaggaaggcttctcttgcttctccctgttcatccaagccactggcttcgtgggtcagataggaacccttctgccgtaccgagcaccagaccatgcccactagcacacatatgatcagaaacaccagcagcgccaggatgccgcccacaatggcatagggaaccgacgtctgagcctctaccaccgcaccagggtcgtagaccacaagtacgtagagcgccctcgcatggccgtgcttattggacgcctcgcaagtgtaggtgccgttatccgcggataccagacccgggagcgtgagccgctctcccacg

SEQ ID NO: 309 - DNA, 703 bp, Homo sapiens
tgaagtaccaactattacttgcaattcttaatgatgaactatatcattctaaattggatgattgcctctgagttggaagtcctccatttctctttccacatgagtagtagcattcacatttgctgttactttatcacttgcttcaacaaaagaacaagttaatttattttatgtttcttaatgctgctgtaatgtttttaattgtttttctttgtcattacagacctgggcattacattctctatcattgatcattgattctgctggcccactctattatgtgcatgtggaacctaccctttctcttattataatagttgtggtaaatgtgcctcctactcatgctgaagttcaccaaagccttggtcgctgtttgaatgcccttattaccacgttaggtccagagctacaaggtaacagtacttcaatttctaccttaaggacttcctgtctactgggttgtgcagtaatgcaagataacccagactgccttgttcaagctcaggccatctcttgccttcagcagcttcatatgtttgctccacgacatgtcaacttgtctagcctggttagctgcctctgtgtgaatctttgtagcccctacttgttactgagaagagcagtactggcttgcttacgtcagcttgtacaaagagaagcagctgaagtttcagaacatgctgttatgcttgctaaggatagc

SEQ ID NO: 310 - DNA, 1280 bp, Homo sapiens
gcaattttttgaccatctccactggaagacagagaatggcttcagggccgggcacttgtgtcttcctgagtttcatgttccccaatcctaccattggtatgtagtaggtactcagagcttttttactgaatgagtcaactggtgagtaataaagaaagcaggaaggagtggctgagtgaagaaatctggaaagaaggaagggagggaaaacaccaggtaggaaatgagtgaacgatggaagaggagagggaattcaacaaggacctcctctttggcttcaggagctggggaccctgaaccagacctgtggatcatccagccccaggaattggtgttggggaccactggagacactgtctttctgaactgcacagtgcttggagacggtccccctggacccatcaggtggttccagggagctggtctgagccgggaggccatttacaactttggaggcatctcccaccccaaggcgacagcggtgcaggcctccaacaatgacttcagcattcttctgcaaaacgtctccagtgaggatgcaggcacctattactgtgtaaagtttcagaggaaacccaacaggcaatacctgtctggacagggcaccagcctgaaagtgaaagcaaaatctacctcttccaaagaggcagaattcaccagtgaacctgcaactgagatgtctccaacaggcctcctggttgtgttcgcacctgtggtcctggggctgaaggcaattaccttggctgcactcctactggccctggctacctctcggaggagccctgggcaagaagatgtcaagaccacaggcccagcaggagccatgaacaccttatcatggagcaagggtcaagagtgaggggtcagccccagagtgaggaccctctgagttggagaggagccagggctcctcaaccatttccctacctccagtcccagcctctaggtgcccccaggcctcatgacaaactcctagatccctacatctggttttggtccacctagtgaaattcccttctttgcaccgggcttccctctaaaatgtctccctttctctttttggcctgttcaagacctccttgcttttcagtccctggctcagtctctcctcaacacccttgcccctgctgcagccctttctggtgcgccctgcccctttccccacctcgctacatccttcttggcctccaacatccaactcagagtcttcttcccaggagatgtctgtaagaatctctgaactcaaccagccagaccatctgtgcccctccatttacacc

SEQ ID NO: 311 - DNA, 1769 bp, Homo sapiens
ggtaataagatcagtatcttcttaatggaagcacctggactacatttttttcattcattgttatcataaatgaggactaacctgtctcccgttgggagttttgaacctagacctcatgtcttcatgacgtcatcactgccccaggcccagctgtgtccctacaccagccccagctgacgcatcttctttttctgcctgtagagatggttacaatgcctggcgtgatgcattctggccttcgcagatcctggcggggctgtgccaacgctgtggcctccctgcccctgaataccgagccggtgctgtcaaggtgggcagcaaagtcttcctgacaccaccggagaccctgcccccaggtatcagcccctttctgttcaagcaagatgtcggtagaacaagggatctcttcacatgtggattgacatctttcctcaagatgtgcctgctccacccccagttgacatcaagcctcggcagccaatcagactggctttctgttcactcacttttctacatccccaaactctggcttgtggtagctccagctttgcatctgatgccacaccatgcaacagtgcagcgccctgattctaaattcacgggaaggagaacctcgctggccccacagaccattcctggggccatctgctgtggccagggtgccccttttagggccccactcgagagtctgaagccaccccctaatgtgccccccagctatgagctcagagttgtcatctggaacacggaggatgtggttctggatgacgagaatccactcaccggagagatgtcgagtgacatctatgtgaagagctgggtgaaggggttggagcatgacaagcaggagacagacgttcacttcaactccctgactggggaggggaacttcaattggcgctttgtgttccgctttgactacctgcccacggagcgggaggtgagcgtctggcgcaggtctggaccctttgccctggaggaggcggagttccggcagcctgcagtgctggtcctgcaggtctgggactatgaccgcatctctgccaatgacttccttggatccctggagttgcagctaccagacatggtgcgtggggcccggggccccgagctttgctctgtgcagctggcccgcaatggggccgggccgaggtgcaatctgtttcgctgccgccgcctgaggggctggtggccggtagtgaagctgaaggaggcagaggacgtggagcgggaggcgcaggaggctcaggctggcaagaagaagcgaaagcagaggaggaggaagggccggccagaagacctggagttcacagacatgggtggcaatgtgtacatcctcacgggcaaggtggaggcagagtttgagctgctgactgtggaggaggccgagaaacggccagtggggaaggggcggaagcagccagagcctctggagaaacccagccgccccaaaacttccttcaactggtttgtgaacccgctgaagacctttgtcttcttcatctggcgccggtactggcgcaccctggtgctgctgctactggtgctgctcaccgtcttcctcctcctgtgtcttttacaccatccctggccagatcagccaggtcatcttccgtcccctccacaaaatactctcgctgaccttggacactcacccagggtgccaacccttcaatgcctgctcctggaagtctttcttacccatgtgagctaccccagagtttagtgcttcctctgaataaacctatcccagacactgaaaaaaaaaa

SEQ ID NO: 312 - DNA, 2562 bp, Homo sapiens
ttttttttttttttacaaatccaagtaacaactttattgtagtatacagcacaatttttacatacatattagtggttttgacagtgttacttttgagtagaccttaaatgaatccacaaagttaatatattaaaaataaaatatacacagtaaaacaacaggcatccagatgttcagaatcatgcagataggagtggtttggttggtgttatcactgggtaccttgcctatttaactcgccagcaaataccacttcttctgtttctcattcccatataattcatcaaaatcagagagttctaaacatatacaaaataaacctcttttaaagccacatcagtaaaaaatttcaattaataaggttatcatcaaaccaagaattccactgatcatttgatcagcccattactaggaaacaggcaatatcagcacccgatctaaaggcaagcctatttcatttattaaaacaccaacaagagagattaatcaacaaagcaactattaacaacatgttaatcttaatataagacactgagagaaaagtaaaaataatacataaatatcactccactgagccaggatataactcatggactacagatacatgagtttcctacctgtcaaacaatgcctttaaaaaatttttttaggaaaaaaaaaaaaaacacaatatatgagaagatgcaaaggaaaggcagaaatgtgaatttatgcatctagttccacaatttaaaataaatatcaaactgacaatataaagctaagtgacaatgacttaaccattgggcaccaaacaggcaatacaactgctcactgtaatacataatgctcttcaggagtttccagcagatggccatcacaacaatactgtcataatacagaaaaaacatttatccactgtggaaagagaccctgaagagaatgtggcaaaggcatagagaaaaagttggatcttttgaaaaagttaatgatatcaaaatacttttccatcactggtaaaccaagctaggtcaagtatatgtcccaaagcagcactgaattcagagtaagaggttggcagaaaagtttggaaaactgcagtttttaaaaattggcaatttctccatgcttaataaaactatcagaagaggtataatgtttgtgcgtttgtggaatgttgactgcttgctgcaaaaatttacaacatgaatgaggacctgcagagatgcatatcaatgaaatatttttttaaaaatttacaaaaaactaaagtttctatttaaaaaagaaccatgttatgccaagatgaaacatggtaaaaagtagtgtaagttctgtccatgattctttacctagtgaatgggaaagtaatagaaacaattttcttcttaaaaaggaaggtttgttattgcactgacttttacaacctgacatagtaatttagaaaaatcatgtagtaaaatctgtaaaattaaaatataaaagtctggtttgtaaacatcagttggccaagtctattcagagtccttcatgatagtggaatggaatgaataattaattcactaccttatttatttgctgtgaggcagaaaattccagaacacagcctttatactttcacagtaattatattcaaaagatataaagtcagtgcagttattttttttctttccctgtgcaatgtttagctctcaccccactcccaagtgccataattgaaataatactggtttggagaattagtacagattggtcataaatgccgcataaagtccgtaggacttcggtaaaggtatttccaaatggcgtagtaatgcactgcagctgccgtggccacaaacaggtgccagatggcgtgggcaaatggaatgatgccatcactcttgaagaacacaactcccaagcaataaattaagcccccacaggcaagttcctgaagtccatcggtgttgttcattgatgtcaccaccaaggctggagagaatcccattgtgagatagaaaaagagttcaacccccttatatttttcatggtagagaaatacataaatggttcctccagctgccatgagccagataaaccaacgcatatgagatgccaggggtccaagttcacgaagatttaaccatggagcataagaagcagcaatgaagaaatagataaccattctatcacacatgtgaaaacaatgctccactgtccttaagtggctctttttccatgatacaatgtgaaatactgtagaaacgatgaagagggcacagagtcccattccataaatccatgctgttatcttttcccagcagtcatcagacagccgatggaggagggcactgcccacgatggccggaacaatgaggaatgcgtgtgtgtaacagttagcagcatgttcatagcaagttggcttgtagcggccattggctggagctcgatggttcatgaaccgctggaatcgattcttgaaccgcattgatcctctgctcctcctcgggggccaggagctccgtctcgtcagcaccggcggccgggcgcgcggccctcatgggcttgggctgctccggaggccgcctgcgtgtccagcgg

SEQ ID NO: 313 - DNA, 595 bp, Homo sapiens
ttttttatcagttaatagtatttattattatttgtggtcaccaatgccaattaaaacaataattaaatagaacatgatgaaataattcaatggtaggaaaaaaaaaaatctggcctacaagtgaacatggaaagtaaaagtaaatatttagaaagtgaaatcaggagtggaaaaaagctccagcatctcaccatggggtcttccaaagccagcagtactggagatgtttattgttcaaagatggacttgcttgggttgggattctccaactagagccagaggggagattctctgcttcccgttccgaccaaagggtaaatgaacccagcacctatgctggcccggacatcactgataggtaagatgaagtcacttggcacaccttttttgtcaggttggtgagacagagaaagatcggtctttgccatgcagatgggcaaatttccaaaaccctgtaagaaaggaaagaaaatgtgttcactgatatagatgtgagtctcctgtgtttttcaatttgcactttatacagtctcggcagcaatggtatgccagctcagatcgaggcacatgcaggagctgcttgttactacttgtt

SEQ ID NO: 314 - DNA, 2076 bp, Homo sapiens
atgaagccatgtgctcattcttggaacgcagagctgtcaagaaacatcatcagacatagttttaacctggtaatggtggctgccagtcaggtggctgtcagtcagctccttggttcttatgaaattcttctgctggtttccatagagttgatgttctgttttggtctggggtatttctttataccaatgcaagaatggcctaacacatatggagaaagggtctttgtagatgtggaatcatcagtatttaaatggaatcataagtgtctacataagacagaggcagagagagattacacaaagaagagattaaagttatgtggccacaagccagggaatgctgttggccaacagaagctggaagaagcaagaaaccgattctttactagagcccctggagggagtgcagccctgccgacacttcgatttcagcccagtgataccgatttcagacttctagcctccagaactattttaacctttgagaccaagaacccgtcggaattagcagaacgtttgcgctctgtttgtgggaatcagagcaatgcctatgcccggctgctggaataccgcctgaatgccttgcgaggactgtggaatgcccagcgccagctggccttagaagaacagcatgaaagggaaagttcaggtgatgaggaaactttggccctgctcaaacgccagggcttgttgcagcaacctgagcaagcgcccttcacatcgaggatggggctcctgctggtcttcccccttattcagtcccagagtagaacagacccctctctctgtaacataactgctgaggtgctattgaactgccttcgtgactgccagcctttgagcttgaccaaggagcctgctgactgtctcaatggaattgaaactttgctgtgctcttggctagaggagacttctgacacaggccgacacatcccacataagcaaaaagaaaatgctgctgctgccctggtggctttggcttgtgccagaggttttgtgtactgccggaacgaggagttggaaccaggatgggtggcttttggcagcggcagtcttctccaccggcctgtctctttcgataataaacctcactcccttttccaggtcattgaccagaacacccttcaggtgtgccaggtggtgccaatgccagccaatcacctccccattggcagcaccatgagcactgtgcacctgtcttcagatggcacttacttctattggatctggtctcctgccagcctgaatgagaaaacaccgaagggacattctgtcttcatggacatttttgaacttgtgacgctgaaaggaaagaaggccaaggggaagaaggtggccccggcccctgctgttgtgaagaagcaggaggccaagaaagtggtgaattccctgtttgagaaaaggcgacatccagcccaaaagagaactcacctactttgtgaaatggcccgctatgtcaggttgcagcagcagagagccatcctctataagcagctgaaagtgcctcctgctattaaccagttcacccaggccctgaactgccaaacagttactcaactgcttaagctggcccacaaatacagaccagagacaaagcaagagaagaagcagaggctgttggcccaggctgagaagaaagctgctggcaaagggggcgtccccactaagagaccacctgcccttcgagcaggagttaacaccatcaccaccttggtggagaacaagaaagctcagctggtggtgattgcacacgatgtggattccatcgagctggttgtcttcttgcctgccctgtgttgtaaaatgggagtcccttactgcattatcaaggggaaggcaagactgggccgtctagtccacaggaagacctgcaccactgtcgccttcacacaggtgaacttggaagacaaaggcgctttggctaagctggtggaaggtatcaggaccaatgacaatgacagatacgatgagatctgctgtcactggggaggcaatatcttgggtcccaagtctgtggcttgcattgccaagctcgaaaaggcaaaggctaaagaacttgccactaaactgggttaa

SEQ ID NO: 315 - DNA, 2321 bp, Homo sapiens
tctagcctggatgacagagcaagactccatctcattaaataaataaataaataaatattcaacaacttaagaaatggggtaagtagttcttatctgttgtttgcttaagagtatgagaatcatcgatcctcatgctattgctgatctgaattgcttttaactttttctttcagattaagaatgacccaaaataaattaaagctttgttccaaagccaatgtgtatactgaagtgcctgatggaggatggggctgggcggtagctgtttcatttttcttcgttgaagtcttcacctacggcatcatcaagacatttggtgtcttctttaatgacttaatggacagttttaatgaatccaatagcaggatctcatggataatctcaatctgtgtgtttgtcttaacattttcagctcccctcgccacagtcctgagcaatcgtttcggacaccgtctggtagtgatgttgggggggctacttgtcagcaccgggatggtggccgcctccttctcacaagaggtttctcatatgtacgtcgccatcggcatcatctctggtctgggatactgctttagttttctcccaactgtaaccatcctatcacaatattttggcaaaagacgttccatagtcactgcagttgcttccacaggagaatgtttcgctgtgtttgctttcgcaccagcaatcatggctctgaaggagcgcattggctggagatacagcctcctcttcgtgggcctactacagttaaacattgtcatcttcggagcactgctcagacccatctttatcagaggaccagcgtcaccgaaaatagtcatccaggaaaatcggaaagaagcgcagtatatgcttgaaaatgagaaaacacgaacctcaatagactccattgactcaggagtagaactaactacctcacctaaaaatgtgcctactcacactaacctggaactggagccgaaggccgacatgcagcaggtcctggtgaagaccagccccaggccaagcgaaaagaaagccccgctattagacttctccattttgaaagagaaaagttttatttgttatgcattatttggtctctttgcaacactgggattctttgcaccttccttgtacatcattcctctgggcattagtctgggcattgaccaggaccgcgctgcttttttattatctacgatggccattgcagaagttttcggaaggatcggagctggttttgtcctcaacagggagcccattcgtaagatttacattgagctcatctgcgtcatcttattgactgtgtctctgtttgcctttacttttgctactgaattctggggtctaatgtcatgcagcatattttttgggtttatggttggaacaataggagggactcacattccactgcttgctgaggatgatgtcgtgggcattgcagaagatgtcttctgcagctggggtctacatcttcattcagagcatagcaggactggctggaccgccccttgcaggtttgttggtggaccaaagtaagatctacagcagggccttctactcctgcgcagctggcatggccctggctgctgtgtgcctcgccctggtgagaccgtgtaagatgggactgtgccagcatcatcactcaggtgaaacaaaggtagtgagccatcgtgggaagactttacaggacatacctgaagactttctggaaatggatcttgcaaaaaatgagcacagagttcacgtgcaaatggagccggtatgacacactttcttacaacaacagccactgtgttggctggagagggatggggtgggcccaacggggacacaaggaggcagaggagctaacccctctactccactttcaaaactacattttaaagggaatgtgtatgtgaagagcactaccaaacatcgcttttgttttgttttgttttgttttaagcttttttttttttgcttgtttttaaagccaaaacaaaaaacaaccaagcactcttccatatataaatctggctgtattcagtagcaatacaagagatatgtagaaagactctttggttcacattccgatattaaaatagtgacatgaactggcaaagtggttttaaaagctttcacgtgggataaatgattttctttttttcttttctttcttcctatggtcttgtctgaataaactactctcctgaataaaacaacatccaacccaggtcattgaaatgaaattggccagtcaaaaaaaaaaaaggggggggccctttaaaaaaaaaaaattttaacccccgggggggggaaagaaattttttttttttggggcccccaaaaat

SEQ ID NO: 316 - DNA, 541 bp, Homo sapiens
  misc_feature (1)...(541): n = a,t,c or g
ccgcctcgggccgcagagcttgccccctccccacccgcagacatgttcgagtccaagaacggccccgagtatgcttcgtttttccccgtcatgggcgcctcggccgccatggtcttcagcgccctgggccctgcctatggcacaaccaagagcggtaccggcatttcggccatgtctgtcattcggccggagcagatcatgaagtccatcatcccagtggtcatggctggcatcatcgccatttccggcctggtggtggcagtcctcatcgccaactccctagagtgctctgtgtatgcggatgatttagaaatgtcatttctctttcctcggatgtttatttataaagatctggcctgttcctgcgtctccggaacggcccttgtttcccagctatttataaccttagttagagggtccccctgtgggttcctgttgtttagacttcctggatggaaccgccctccccgccgggcccgtggccctgcacggaactgtgtcccccaaagtttttggatgtgnnnnnnnnnnnnnnnnnnnn

SEQ ID NO: 317 - DNA, 456 bp, Homo sapiens
  misc_feature (1)...(456): n = a,t,c or g
cccacgcgtccggcttcgtggtccagggctccaatggcgagtttcctttcctgaccagcagtgagcgcctcgaggtggtgagccgtgtgcgccaggccatgcccatgaacaggctcctgctagctggctccggatgcgagtccactcaagccacagtggagatgaccgtcagcatggcccaggtcggggctgacgcggccatggtggtgaccccttgctactatcgtggccgcatgagcagtgcggccctcattcaccactacaccaaggttgctgatctctctccaatccctgtggtgctgtacagtgtcccagccaacacagggctggacctgcctgtggatgcagtggtcacgctttcccagcacccgaatattgtgggcatgaaggacagcggtggtgatgtgaccaggattgggctgattgttcacaagacccaggaagcangattttagg

SEQ ID NO: 318 - DNA, 638 bp, Homo sapiens
cccacgcgtccgccccaagctggtcatggaactgatgcccatcggtctgcgggggctgatgatcgcagtgatgctggcggcgctcatgtcgtcgctgacctccatcttcaacagcagcagcaccctcttcactatggacatctggaggcggctgcgtccccgctccggcgagcgggagctcctgctggtgggacggctggtcatagtggcactcatcggcgtgagtgtggcctggatccccgtcctgcaggactccaacagcgggcaactcttcatctacatgcagtcagtgaccagctccctggccccaccagtgactgcagtctttgtcctgggcgtcttctggcgacgtgccaacgagcagggggccttctggggcctgatagcagggctggtggtgggggccacgaggctggtcctggaattcctgaacccagccccaccgtgcggagagccagacacgcggccagccgtcctggggagcatccactacctgcacttcgctgtcgccctctttgcactcagtggtgctgttgtggtggctggaagcctgctgaccccacccccacagagtgtccagattgagaaccttacctggtggaccctggctcaggatgtgcccttgggaactaaagcag

SEQ ID NO: 319 - DNA, 1128 bp, Homo sapiens
tacaacagggcaatgtttcatccccacgctgtcaataagattgcattaagcttgaacaacaagaatccccagatcaaaagtcttgtttttagaactgttggcagccgtttgtcttgtaagaggcgggcataaattattttatctagcatttgataactttaaagaggtttgtggagaaaaacagcgctttgagaagttgatggaacatttcaggaatgaagacaataacatagattttatggtggcttctatgcagtttattaatattgtagtccattcagtagaagatatgaatttcagagttcacctgcagtatgaatttaccaaattaggcctggacgaatacttggacaagctgaaacacactgagagtgacaagctttcaagtccagatccaggcttacctggacaatgtttttgatgtaggagctctactggaagatgctgaaactaagaatgctgccttggagagggtggaagaactggaagaaaacatttctcatttatctgaaaaactgcaagacacagagaatgaagccatgtccaagattgtggaactggaaaagcaactcatgcagaggaacaaggagctggatgtcgttcgggaaatctacaaagatgcaaatactcaagttcacacattaagaaaaatggtcaaagaaaaagaagaagcaattcaaagacagtctaccctggaaaaaaagattcatgagctagagaaacaagggaccattaaaattcagaagaaaggggatggggatatcgccatactgccagttgtggcttctggcacattgtccatggggtcagaagtggtagcaggtaactctgtgggacccacaatgggggccgcttcctcaggacccttgccccctcctccaccaccactgcctccctcatcagacacacctgaaacagtgcaaaatggtccagtaacaccacctatgccaccgccgccgacgccccctcctccacctcctcctccaccaccgccccctccgcctcctcctctcccaggccctgcagctgagactgtaccagctcctcccttagcacctccccttccctctgcacctccgctgcctggaacatcttcacccacagtggttttcaactcaggattagcag

SEQ ID NO: 320 - DNA, 1816 bp, Homo sapiens
  misc_feature (1)...(1816): n = a,t,c or g
agagggagcaggccnnnnnaatgagnaatgangtatatacacagngcggnggaattctgccaagaagaatgtaagttctccaacatcttcaaataaagaagtggttatgaggaatgatcagaataatggagatatgaaaccattccagaatttcacaacaataccaatcacacaggctctcaactacaatctgagcaaagaagggcatttagaaaaagaaccttggaatgcattcagccatcatggcccagttaatgtctccatcaatggaattccttgcattctcttctgggccaaaagaataatgattaaatttaagaatcaaacctggctggaccttacagacgagccatttggtcagaaggtaactgtggaccctgacaactcaaattgcagtgaagaaagtgctaggttgtctttgaagcttggtgatgctggaaaccccagaagtcttgctataagattcatccttaccaattacaacaagttgtccatccagagttggtttagtttgcgccgagtcgagatcatttccaacaattcaatccaagcagtctttaacccaactggcgtatatgctccctctggttactcctaccgctgccaacgcgtgggcagcctgcagcaggaccaggccctcttgctgcccagcgacacggatgatgggtcgagcctgtgggaggtcacttttattgatttccagatccaaggttttgccatcaaggggggacgatttaccaaagcccaagactgcgcctcctccttctcgccagcttttctgatcggcctggcaatgtccctgatcctgctgctggtgttggcctatgccctgcacatgctcatctacctgcggtatctggaccaacaatatgatctcatcgcctctcctgcccacttctcgcagctgaaagctcgagacacagccgaagagaaggagctgctgaggagccagggggctgaatgctataaactgagaagccaacagatcagcaaaatctatgtttagcagcacaggctggcccccaccatgtccacagtgggctccgaaagttgtctctgttctgtgctatttgacttgtgaattacagattttcaccgaatggcttgattacaaaaaaaaagaaaaaacgcagaaaggaaatagataatgaattctttttgaaccatccactggcctacttaggtagacttggggcaatcaaaaaaggcatctcagggatcccacagagacaaatatgcctgttagttgcctcaaagtaccctgaaagcaaaggggtatttcaagtacggagaaagagagagagagaagaagaaggaggaggaggaggaggaggagaaggagaaggaggagcaggaggaagaggaggaggaggaggaaagggagggagggagggagagggagagagagagaaagattggcaacacagagaaggggaaaacacacttggtcctccttgcctgtgccagtttggatgtgacaattatagaaataataaaccaagattatctggaagttcataatttaaactattttgtaacataatttgcatttctagatattatgtcccaattttgttttaaaaacagtctttttctctttcatagaaatgttgagggaggactcaacatgtggcagagcactttatttaaggaccttcttgtcctttactgtgctgttcagaagcagtacagctccatctgtgaagtaggggtaatagtcatggccatattttacctttccatttgggaaggggccagggttgtctcacttgtctgatttagacctccatgagctctcataggtccacttggaata

SEQ ID NO: 321 - DNA, 1658 bp, Homo sapiens
ttttttttttttggctgcaccagtgtattttcccatccaaaacatacacaggggaggcttgatgccaccccaggaaacagaataaccccttctagggacttcttagcagagactgatctccatctgcccgcaagggctgggtgtccaatttgtcctgcttcccagagctgcatggtgggtagaggagtaagtggaacataagaacaggcttgcatgactgtgtttatttgaaccaccagatctgttccaataaagagctctccagaccctgcctcaccttacagggaagggcttagagtcagggaagaggggcctgttgctcctgtccctgaaaaaggaggtcaagatggagcccgggcttcctggtgaccattcagactcctcccactgcttgtccctgtggaggacacaggacgggctaccccatctcaggtttggggtgggatcgctcacagtcacccccggaacagccccaactgagggtggggggcctggccctggacacctcatgtctctgggccgggaagccacgatccctcatccatcaggcctgctgccgctctccaccccagcgggggatggacatctgtgctccctcgcagtacactgcggacccaggaggtcccctgcatgacattcctctccttggcctcaggccagcaggcggctgtactctgccagagcagaggactttctcaccccatcccagatccgggcagcgtagtggaaccagttcttctcggtgaggatcgtgtgtgacagctgtggccgggccatggacatcacttggctccggagcttgctcaccaaggactggaaactggggtggccacgatacccaggcagcagggagaagagtgggctggaaccaggtcctgctcttggtgggttttcactctctgcttcactgtccatgaagggtaccaggaataagttgacctcagagtccaggaagtcaggtggaagccccgggaagacattgcattgtaacatggacagagttcccttgtaacgcaggtgggagtgggccatgagctggtcaatcatcaggtgcatctgccgcagcttccgaggacagaagtcctctcggcgagctttgttctgcaagaagactaggtgggggtagtactcggtgccttcatcggagcccgatgagctgctggactcgtggctgggggatggggtggagggcttcaccatctctgctgtctgcaggaacctgtagagactgaggtctgtgaaccagtcctggacaacaatcaccacatggcagaccgtgaaaaggaaggcagcaatctggagtgactgcatttcaacgtaagtgtggggaaggttgtactctggaggcagtttgcggtcattattgatgagatggtctaggatagaagggctcaggatgggctgtgtgtccaggaaaacaatccgttcttgggtaataaagaagtcgatgccactggtctggttgccccctcgttccttcatttcagcgctctgggcccggaaaacataagtcctctggtcctcctctggagtgttggctgacaacaatgacatgaccatggacttgcctgtcccctggaggcccaggacaccaaccaccaacacatcagtctgatccaacaggtactcgatgccactgtcacgaattccacgtctgg

SEQ ID NO: 322 - DNA, 646 bp, Homo sapiens
gatcaagattcggagtttgggctgcctaatagctgcaatgatactgttgtcctcactcaccgcgcaccccatcttgaggcttatcatcaccatggagatatccttcttcagcttcttcatcttactgtacagctttgccattcatagatacatacccttcatcctgtggcccattcctgacctcttcaacgacctgattgcttgtgcgttccttgtgggagccgtggtctttgctgtgagaagtcggcgatccatgaatctccactacttacttgctgtgatccttattggtgcggctggagtttttgcttttatcgatgtgtgtcttcaaagaaaccacttcagaggcaagaaggccaaaaagcatatgctggttcctcctccaggaaaggaaaaaggaccccagcagggcaagggaccagaacccgccaagccaccagaacctggcaagccaccagggccagcaaagggaaagaaatgacttggaggaggctcctggtgtctgaaacggcagtgtattttacagcaatatgtttccactctcttccttgtcttctttctggaatggttttcttttccattttcattaccacctttgcttggaaaagaatggattaatggattctaaaagcctaaaaaaaaaaaa

SEQ ID NO: 323 - DNA, 1530 bp, Homo sapiens
atggcaataaccttgcgggagctgaatggcctgagctatgaagagatagccgctatcatggattgtccggcgttgacgatagcgggatactggataagggtattaggcatgcagaaagaacaactttccgctttaatggatggcgaaacgctggatagtgagctgcttaacgaactggctcataacccagaaatgcagaaaacctgggaaagctatcacttaatccgtgactcaatgcggggtgatactcccgaggtgctccatttcgatatctcttcacgcgtgatggccgccattgaagaagagccagtgttcttgcgtgatattatatgcgagtataactgcgcgtcgatcccatatgaacgtgatcgcataatgcaaagtgtcacaaagatcgttaatgctcaactcatccggatcgagcttgcgggaaagcataccattgatgtactgatggaacggctatctgttcgaattgcgctgataaaaaaattactgcgtctttttttcccgctctcgctgcgggtacgttttctgttggcaacggcagcggtagtactggtgctttcgcttgcatacggaatggtcgcgctgatcggttatagcgtcagtttcgataaaactacgtttcggctgttacgtggcgagagcaatctgttctatacccttgcgaagtgggaaaacaataagttgcatgtcgagttacccgaaaatatcgacaagcaaagccccaccatgacgctaatttatgatgagaacgggcagcttttatgggcgcaacgtgacatgaaaggatggacgaacgaatgcatcctcgtactgagtggagatcattcgatacagcaacagttgcaggaagtgcgggaagatgatgacgacgcggagatgacccactcggtggcagtaaacgtctacccggcaacatcgcggatgccaaaattaaccattgtggtggtggataccattccggtggagctaaaaagttcctatatgggtttgtgtgggcagcccacaaataaagacgtccttcgccggatgaagaagcgctaccccacgacgttcgttatggtggtcatgttggcgagctatttccttatctccatgtttggaggagtcatggtctttgtgtttggcattacttttcctttgctgtgtatggaaaaaattgtatctacaaaggcaattcttgacaaaaacacaaatcagtgcaaaggtatgtgtaagggcatccgtaccctgaaatcttgcctatgctatctgattaatggttcttccattgtggaggtccaggactcctggctgatgggtgctatcaagttccaacaggaaagcagacttttacaccacagacttttaagtgctattagaattaaacagaaggaggaggaagaaaggaacaagaaggagaagaaagacaaagagctggagagcatatttcccagctatggcccttttcactactttaaaagcaaaaccatcaaagaatgggcacctttctatgggtatgacttttatccccttgtcctctag

SEQ ID NO: 324 - DNA, 1268 bp, Homo sapiens
  misc_feature (1)...(1268): n = a,t,c or g
acccgttacgacccacgcgtccgccgagatcgctgtggcacaagtgatccttatgtgaaatttaagctgaatgggaagacgctgtacaaaagtaaagtcatatataagaacttgaacccagtatgggatgagatagttgtattgccaatccaaagccttgatcaaaagctacgtgtgaaggtatatgatcgagatttaaccacatctgatttcatgggttctgcatttgtcattctcagtgatcttgagcttaacagaacaactgaacatattttaaaactggaagatccaaacagtttagaagatgacatgggagtgatcgtcttaaatttgaacctagtggtaaaacagggtgatttcaagagacaccgttggtcaaatcggaagcgattaagtgccagcaagtcctctttgatacgcaacctacggctctctgagtccttgaaaaagaaccaactctggaacgggattataagtataactttgttggaagggaagaatgtctcaggaggaagcatgacagagatgtttgtccagttaaaactgggagatcagaggtataaaagtaagacactgtgtaagagtgcaaatccgcagtggcaggaacagtttgactttcactacttctctgacaggatgggcattttggacattgaagtgtggggaaaggacaacaaaaagcatgaggaacgtctgggcacgtgtaaagtggatatctcggcactccctctgaagcaagccaactgcctggagctgccactggacagctgtctgggggctctccttatgttggtcacacttacaccctgtgcgggggtctccgtctctgatctgtgtgtctgccccttagcagacctcagcgaaagaaagcagattacccagcgatattgcttacagaactccctgaaagatgtgaaagacgtcggcattctacaagtgaaggttttaaaggcagcagatctcttagcggcagatttctcagggaagagtgacccattttgcttgttggagttaggcaatgaccgacttcagacgcataccgtctacaaaaacctcaaccctgaatggaacaaagtttttacatttcccattaaagatatccatgatgttttggaagtgacagtgtttgatgaagatggagataaannnnnnnnnnnnnnnnnnnnnnnnnnnaaanaannaanaaaaannnaaannnnnnnnnnnnnnnnnnnnnnnnnngggcggccttttaaaaaaaaacaatttttttggcgcggggtggggga

SEQ ID NO: 325 - DNA, 1735 bp, Homo sapiens
ttttttttttccttggtggaaatttttttggtgttttttgtgctctgttgcaagctgattcctagattaatggcctcccagcagatttgaaaggaaacctggaagacttcttattttgctgtgccttctgcttcctggtcttgtgtaaagtcccaattcactctcaatttgatccagctctgactggtcaagtagttcaaaagtcatcaccttcttcagtgtctgtgtcctcttctgggatgggggcagcctgagaaagtgcttgctgcacaccctctaactggtctttgatagctgcaagtcactgcagcttgtggataacatccccagccagggtttgcttcatcaggtgaaaaggttttgggtcactggttcagaggaaaggggtgagacccagctgctggattgcgtcttctttgcttgggtcttgtgaccactgtccaacttgttccttctttctcttgagctcagtggggcaaaccaagggttaaatttcatcttcatcatttggttcccatgccatttttctagagatggaaaatctgaaagatctctagagaaaacttcctcactgggtcggtcaagatcatcagaagtgtctgtctgtggagtgtatccttctgaaaggttgaaggtcccattatcagtccaggatacctctgagacgtctgtgtcagacacagataactctttggcagcaaccgtgaggctaatcttaggacaaagagctgaaaagtctaattcactgtcatctttgtgacttttttctttgtctgcttcagatctctcacgtttcttctgattaatatattctccaattccaaaatccagtttcagcagaactgacttaattttgctgtaaattttttgtccaatatcattacatttaaacaatggacacaaaaatgcaacacagtaaacagtagatagctgagtataacccccaggaatggtaacttccccaagatcgtaaaaaaatgtgcaacaacacttacaagacccaggaagacaaaaacttgcccagggctctgctgtttaaaaagagacatttcttgaagaaatatgctgaaattcatccatgattctgcaataccagtggctgagccctgggtctttcatctggtttggaattgataacttcccagcctttcactgaggcttctccacaactgtgcacctcttgttctagacaaaaccatatcctttattatttgcataataacacgcccaagtatcatgacggaaatcaggtgatatactctccatggagtcaatgcaaggaaccagaacagcaggttggcagcgacgaagccgagcagcgtccgcagcggcctcttccagctcagcagctcgtcggcgcggcagcccagccacagcgaccggctccccgagcagccaggttaccgcggccgccgcccggcccgcggcctcctccacctgcaaccccgcgccctccgccgccccagcttcctgcgcttcctcctcctgctgctgccgctctgcgggggatgcctggggcggtggcggcgacggcggcgcctgctcctcggcggcaggagccgggcatccctcctcggcgtgctccggaggcgccgggctcgccatcttcagctgtgcttccaggcagggacggggccgggcgcgcgcgcgggcgcgcctgggtgtgggtgccgccgagggcggggcggcggtggcggcaggtcccggagcggggcgcgcaccgcggggcacaggc

SEQ ID NO: 326 - DNA, 1735 bp, Homo sapiens; identical to SEQ ID NO: 325

SEQ ID NO: 327 - DNA, 376 bp, Homo sapiens
ggaggtctcactgagcaccgtcccagcatccggacaccacagcggcccttcgctccacgcagaaaaccacacttctcaaaccttcactcaacacttccttccccaaagccagaagatgcacaaggaggaacatgaggtggctgtgctgggggcaccccccagcaccatccttccaaggtccaccgtgatcaacatccacagcgagacctccgtgcccgaccatgtcgtctggtccctgttcaacaccctcttcttgaactggtgctgtctgggcttcatagcattcgcctactccgtgaagtctatggacaggaagatggttggcgacgtgaccggggcccaggcctatgcctccaccgccaagtgcctgaacatt

SEQ ID NO: 328 - DNA, 794 bp, Homo sapiens
cggatagtcttcgaacaagaccacgccaagcttggcacgagggcggggacgcggcgggacagcgacatggccggccacactcagcagccgagcgggcgcgggaaccccaggcctgcgccctcgccctccccagtcccagggaccgtccccggcgcctcggagcgggtggcgctcaagaaggagatcgggctgctgagcgcctgcaccatcatcatcgggaacatcatcggctcgggcatcttcatctcgcccaagggggtcctggagcactcaggctccgtgggtctggccctgttcgtctgggtcctgggtgggggcgtgacggctctgggctccctctgctatgcagagctgggagtcgccatccccaagtctggcggggactacgcctacgtcacagagatcttcgggggcctggctggctttctgctgctctggagcgccgtcctcatcatgtaccccaccagccttgctgtcatctccatgaccttctccaactacgtgctgcagcccgtgttccccaactgcatcccccccaccacagcctcccgggtgctgtccatggcctgcctgatgctcctgacatgggtgaacagctccagtgtgcgctgggccacgcgcatccaggacatgttcacaggcgggaagctgctggccttgtccctcatcatcggcgtgggccttctccagatcttccaaggacacttcgaggagctgaggcccagcaatgcctttgctttctggatgacgccctccgtgggacacctggccctggccttcctccagggctcctt

SEQ ID NO: 329 - DNA, 978 bp, Homo sapiens
gtgattacaggcatgagccatcgcacctggccatgaaggcttttagatgggtctggagcttggaggagaagtctgaactaaggataaactaaagagaggccaatgagacttgaaccctgagcctaagttgtcaccagcaggactgatgtgcacacagaaggaatgaagtatggatgtgaaagaacgcaggccttactgctccctgaccaagagcagacgagagaaggaacggcgctacacaaattcctccgcagacaatgaggagtgccgggtacccacacagaagtcctacagttccagcgagacattgaaagcttttgatcatgattcctcgcggctgctttacggcaacagagtgaaggatttggttcacagagaagcagacgagttcactagacaaggacagaattttaccctaaggcagttaggagtttgtgaaccagcaactcgaagaggactggcattttgtgcggaaatggggctccctcacagaggttactctatcagtgcagggtcagatgctgatactgaaaatgaagcagtgatgtccccagagcatgccatgagactttggggcaggggggtcaaatcaggccgcagctcctgcctgtcaagtcggtccaactcagccctcaccctgacagatacggagcacgaaaacaagtccgacagtgagaatggtaagttttctttttggctttataatgttggcattcagtgcttctgtctgttttggttgactccgcgggggggggatgtttttctttctctctttcctctcatccttctttctctctctttcttgtccatttctttttgttttaatgtagtagaactcaagaaatgtccttgaataatgcattttttcctggaaaaaaaaatcaatatttgacatcagattgttaaattaggcaagcagtctacaatgttttggctatagttttgaaaaacaggttaatcatctacagaaaaaaaaaa

SEQ ID NO: 330 - DNA, 954 bp, Homo sapiens
ttttttttttttcctgaatgacacccataacagctttattttcaaaggcgggatccctccccgggcttgtgatgggacggcgctgtgggcccgagcagcagagccgtgcaggacaggcatgggcaggggtggggcagctggcccgggaggccggcaggtcccagaagacacctcacacgggttccatctgcagctcctccccgtccacagcctcaatctggtggaaggcagcgtgggagccgatgaccaccagggtggctcccagcacccagaagacggccgagcccgcaccagccagccagaagaaggggaaggagatgcctccagccagagcatactgatgcgctgggctcacctctcggccaaagagcacaagcttggactccaaggtgcgcagatagagaatgtaacaggcgccgaaaaagacagccagagccaccagcaacataggggacgtcaccacacagtacaggatgaggcccaggaacacgaacacatagttgctctggtagtactccacgttgcgtacgaggcgctggcacagctctcccaggttgcggggccgtgagaagcgctgctggtccacgaaggtgctccagggccggatggtcgcgcggcgccgctccagccactcccggcctgcaccggagggaatcagcttcggcagcagggtcgtgccgctcagcccttccgcctcggcatctttctgctggtccttctgcgctgccatgtttgcgtcgtgaggggtagagctgctgtaaccagcccggtaccctgaagaccccgccggccccgcccgacgccggccccacccagcggagtcgacgtggcgcagccccggagcagctggggactgtagttctgccgccgagtattgtgggagttgtagtcctgacggtgactaagaggatgggcgctatatggcgggttttacggccttcatcagggtccaat

SEQ ID NO: 331 - protein, 145 aa, Homo sapiens
VSFLSSFFLSLPYGVAVGVAFSVLVVVFQTQFRNGYALAQVMDTDIYVNPKTYNRAQDIQGIKIITYCSPLYFANSEIFRQKVIAKTGMDPQKVLLAKQKYLKKQEKRRMRPTQQRRSLFMKTKTVSLQELQQDFENAPPTDPMY

SEQ ID NO: 332 - protein, 314 aa, Homo sapiens
SGLFSVDPASSQAMELSDVTLIEGVGNEVMVVAGVVVLILALVLAWLSTYVADSGSNQLLGAIVSAGDTSVLHLGHVDHLVAGQGNPEPTELPHPSEGNDEKAEEAGEGRGDSTGEAGAGGGVEPSLEHLLDIQGLPKRQAGAGSSSPEAPLRSEDSTCLPPSPGLITVRLKFLNDTEELAVARPEDTVGALKSKYFPGQESQMKLIYQGRLLQDPARTLRSLNITDNCVIHCHRSPPGSAVPGPSASLAPSATEPPSLGVNVGSLMVPVFVVLLGVVWYFRINYRQFFTAPATVSLVGVTVFFSFLVFGMYGR

SEQ ID NO: 333 - protein, 27 aa, Homo sapiens
MLAQYYGIQGLSHMNQPGKPIPIAQEG

SEQ ID NO: 334 - protein, 123 aa, Homo sapiens
SPARGKSNRTDVMITAPKNKKMTENLAAPEALDSSTHSSSTATQSRAKMNTPAPTPSTVPAIPRGGSGGPPPCAPHDRVSSVLQCDTQAMDHKTESSHSVVEFLFKRTKTPSPFHPAVRENRN

SEQ ID NO: 335 - protein, 173 aa, Homo sapiens
FPRLFNLRSIYLQWNRIRSISQGLTWTWSSLHNLDLSGNDIQGIEPGTFKCLPNLQKLNLDSNKLTNISQETVNAWISLISITLSGNMWECSRSICPLFYWLKNFKGNKESTMICAGPKHIQGEKVSDAVETYNICSEVQVVNTERSHLVPQTPQKPLIIPRPTIFKPITPHP

SEQ ID NO: 336 - protein, 109 aa, Homo sapiens
  misc_feature (1)...(109): Xaa = any amino acid or symbol as shown in the table 8 as set forth in Example 2
EQAVCVGWLQIPRGTKRPKPPGGTHGRTDGRREPERTGGGXAPRAAKEEKLTTAKLPRRLSFAALRNETLPARSALRLLLPLQSRAGPPEERMLSGAGLHGQGQVSENE

SEQ ID NO: 337 - protein, 139 aa, Homo sapiens
KNERQTTDISVHVCCQILKRGSHYSNTQSQPQEGGTQHQGGEPPQLAPGPTALPGEPPPPPAPAHSPPGPPPAGAAAPQPGARPHGAPPLTPARRLRRSRLAAAALLSRTSGAPRRALAPTPGTGVPPGPPPSGPPGNE

SEQ ID NO: 338 - protein, 685 aa, Homo sapiens
  misc_feature (1)...(685): Xaa = any amino acid or symbol as shown in the table 8 as set forth in Example 2
NSSWPAEPAASPWRPLWRALGATFPSGSQPAARTPAGPCIGGMAPPGFKHVSSMLALTIIASTWALTPTHYLTKHDVERLKASLDRPFTNLESAFYSIVGLSSLGAQVPDAKKACTYIRSNLDPSNVDSLFYGWPRASQALSGMXRSLFSNETKDLAFGQLFSXGTSSVYPRSYHASVAALKWALGLPLASQEALSALTARLSKEETVLATVQALQTASHLSQQADLRSIVEEIEDLVARLDELGGVYLQFEEGLETTALFVAATYKALMDHVGTEPSIKEDQVIQLMNAIFSKKNFESLSEAFSVASAAAVLSHNRYHVPVVVVPEGSASDTHEQAILRLQVTNVLSQPLTQATVKLEHAKSVASRATVLQKTSFTPVGIVFELNFMNVKFSSGYYDFLGRKLKGDNRYISNTVELRVQDPPTEVGITNVDLSTVDKDQSIAPQTTRVTYPAKAKGTFIADSHQNFALFFQLVGVNTGAELTPHQTFVRLHNQKTGQEVVFVAEPDNKNVYKFELDTSERKGLNLTSRSGTYTFYLIIGDATLKNPILWNVADVVIKFPEEEAPSTVLSQNLFTPKQEIQHLFREPEKRPPTVVSNTFTALILSPLLLLFALWIRIGANVSNFTFAPSTIIFHLGHAAMLGLMYVYWTQLNMFQTLKYLAILGSVTFLAGNRMLAQQAVKRTAH

SEQ ID NO: 339 - protein, 310 aa, Homo sapiens
  misc_feature (1)...(310): Xaa = any amino acid or symbol as shown in the table 8 as set forth in Example 2
SLIIGQYCIAREGKGFTHPVGQLSCLGQKLYNGTTKTVTWWSSNYTEKNPFSKFPKLQTVWAHPELHWDWTAPTGLYWVCGHRAYAKLPDQWTGSCVIGTIKPSFFLVPIKTGKLLGFPVCASCEKXSIAIGDWKDDEWPPEKILQYYGPATWSQDVSWGYGTPIYMLNRIIWLQAVLEIITNKTTQALTVLAWQETLMRNAIYQNRLALDYLLAAEGGVCEKFDLTNYCLHIDDQGQVVEDIVKDITKLAHAPVQVWHGLNLGAMFGNWFPAIGGFKTLIIRVIIVIGTCLLLPCLIPVFLQMIKNFVA

SEQ ID NO: 340 - protein, 293 aa, Homo sapiens
EHGAGAGGGGRTGGRGPYPGTAGLPAQGAALGGLCLAVLWKRTGRPPSGQPLLTAPLPCLAGSSGHLWAASAVPCQPSDYLRQPRQLLQQKFVNSAWGWTCTFLGGFVLLVVFLATRRVAVTARHLSRLVVGAAVWRGAGRAFLLIEDLTGSCFEPLPQGLLLHELPDRRSCLAAGHQWRGYTVSSHTFLLTFCCLLMAEEAAVFAKYLAHGLPAGAPLRLVFLLNVLLLGLWNFLLLCTVIYFHQYTHKVVGAAVGTFAWYLTYGSWYHQPWSPGSPGHGLFPRPHSSRKHN

SEQ ID NO: 341 - protein, 57 aa, Homo sapiens
MQGVRVSFGWAMGLAWGSCALEAFSGTLLLSAAWTLSLSPPICGHLSPQQVGGRGGD

SEQ ID NO: 342 - protein, 146 aa, Homo sapiens
PYRPEFPGSAAGVATILRTLAMKALMLLTLSVLLCWVSADIRCHSCYKVPVLGCVDRQSCRLEPGQQCLTTHAYLGKMWVFSNLRCGTPEEPCQEAFNQTNRKLGLTYNTTCCNKDNCNSAGPRPTPALGLVFLTSLAGLGLWLLH

SEQ ID NO: 343 - protein, 410 aa, Homo sapiens
EFGNRFDVNNCSICYHWVTSRPQEPAVFSADYRGCHVLEKDGRFHLRVFMEAVLPNGRVDVAQDATLICPKPDPSRTLDSQLAPPAMFSVSIPQTLSFLPTSGHTSQGSGHAFPSPLDPGHSSVHPTPALPSPGPGPTLATLAQPHWGTLEHWDVNKRDYIGTHLSQEQCQVASGHLPCIVRRTSKEACQQAGCCYDNTREVPCYYGNTATVQCFRDGYFVLVVSQEMALTHRITLANIHLAYAPTSCSPTQHTEAFVVFYFPLTHCGTTMQVAGDQLIYENWLVSGIHIQKGPQGSITRDSTFQLHVRCVFNASGFLPIQASIFPPPSPAPMTQPGPLRLELRIAKDETFSSYYGEDDYPIVRLLREPVHVEVRLLQRTDPNLVLLLHQCWGAPSANPFQQPQWPILSD

SEQ ID NO: 344 - protein, 221 aa, Homo sapiens
AAAASNWGLITNIVNSIVGVSVLTMPFCFKQCGIVLGALLLVFCSWMTHQSCMFLVKSASLSKRRTYAGLAFHAYGKAGKMLVETSMIGLMLGTCIAFYVVIGDLGSNFFARLFGFQVGGTFRMFLLFAVSLCIVLPLSLQRNMMASIQSFSAMALLFYTVFMFVIVLSSLKHGLFSGQWLRRVSYVRWEGVFRCIPIFGMSFACQSQVLPTYDSLDEPSV

SEQ ID NO: 345 - protein, 399 aa, Homo sapiens
PRVRLLRPSRSRSCRGLLSTRAPGPSPFRSLHSSPLLPHAMKSPFYRCQNTTSVEKGNSAVMGGVLFSTGLLGNLLALGLLARSGLGWCSRRPLRPLPSVFYMLVCGLTVTDLLGKCLLSPVVLAAYAQNRSLRVLAPALDNSLCQAFAFFMSFFGLSSTLQLLAMALECWLSLGHPFFYRRHITLRLGALVAPVVSAFSLAFCALPFMGFGKFVQYCPGTWCFIQMVHEEGSLSVLGYSVLYSSLMALLVLATVLCNLGAMRNLYAMHRRLQRHPRSCTRDCAEPRADGREASPQPLEELDHLLLLALMTVLFTMCSLPVIYRAYYGAFKDVKEKNRTSEEAEDLRALRFLSVISIVDPWIFIIFRSPVFRIFFHKIFIRPLRYRSRCSNSTNMESSL

SEQ ID NO: 346 - protein, 382 aa, Homo sapiens
  misc_feature (1)...(382): Xaa = any amino acid or symbol as shown in the table 8 as set forth in Example 2
CSEAEYTSAATEAGLELVDKGKAKELPGSQVIFEGPTLGQQEDQERKRLCKAMTLCICYAASIGGTATLTGTGPNVVLLGQMNELFPDSKDLVNFASWFAFAFPNMLVMLLFAWLWLQFVYMRFNFKKSWGCGLXSKKNEKAALKVLQEEYRKLGPLSFAEINVLICFFLLVILWFSRDPGFMPGWLTVAWVEGETKYVSDATVAIFVATLLFIVPSQKPKFNFRSQTEEERKTPFYPPPLLDWKVTQEKVPWGIVLLLGGGFALAKGSEASGLSVWMGKQMEPLHAVPPAAITLILSLLVAVFTECTSNVATTTLFLPIFASMSRSIGLNPLYIMLPCTLSASFAFMLPVATPPNAIVFTYGHLKVADMVTQLFLFTPVGL

SEQ ID NO: 347 - protein, 383 aa, Homo sapiens
ELARRPKQQSSEKSRNMIRNWLTIFILFPLKLVEKCESSVSLTVPPVVKLENGSSTNVSLTLRPPLNATLVITFEITFRSKNITILELPDEVVVPPGVTNSSFQVTSQNVGQLTVYLHGNHSNQTGPRIRFLVIRSSAISIINQVIGWIYFVAWSISFYPQVIMNWRRKSVIGLSFDFVALNLTGFVAYSVFNIGLLWVPYIKEQFLLKYPNGVNPVNSNDVFFSLHAVVLTLIIIVQCCLYERGGQRVSWPAIGFLVLAWLFAFVTMIVAAVGVITWLQFLFCFSYIKLAVTLVKYFPQAYMNFYYKSTEGWSIGNVLLDFTGGSFSLLQMFLQSYNNDQWTLIFGDPTKFGLGVFSIVFDVVFFIQHFCLYRKRPGYDQLN

SEQ ID NO: 348 - protein, 271 aa, Homo sapiens
IRNLNSPALLEDSVIRQAKAAGKRIVFYGDETWVKLFPKHFVEYDGTTSFFVSDYTEVDNNVTRHLDKVLKRGDWDILILHYLGLDHIGHISGPNSPLIGQKLSEMDSVLMKIHTSLQSKERETPLPNLLVLCGDHGMSETGSHGASSTEEGNTPLILISSAFERKPGDIRHPKHVQQTDVAATLAIALGLPIPKDSVGSLLFPVVEGRPMREQLRFLHLNTVQLIKLLQENVPSYEKDPGFEQFKMSKRLHGNWIKLYLEEKHSEVLFNL

SEQ ID NO: 349 - protein, 141 aa, Homo sapiens
EVRVQAPVSRPVLTLHHGPADPAVGDMVQLLCEAQRGSPPILYSFYLDEKIVGNHSAPCGGTTSLLFPVKSEQDAGNYSCEAENSVSRERSEPKKLSLKGSQVLFTPASNWLVPWHIVGTALHLELWVVSGMEGAQLFSRI

SEQ ID NO: 350 - protein, 121 aa, Homo sapiens
SPVWTEKRKMQDTGSVVPLHWFGFGYAALVASGGIIGYVKAGSVPSLAAGLLFGSLAGLGAYQLSQDPRNVWVFLATSGTLAGIMGMRFYHSGKFMPAGLIAGASLLMVAKVGVSMFNRPH

SEQ ID NO: 351 - protein, 339 aa, Homo sapiens
MGLGPVFLLLAGIFPFAPPGAAAEPHSLRYNLTVLSWDGSVQSGFLAEVHLDGQPFLRYDRQKCRAKPQGQWAEDVLGNKTWDRETRDLTGNGKDLRMTLAHIKDQKEGLHSLQEIRVCEIHEDNSTRSSQHFYYDGELFLSQNLETEEWTVPQSSRAQTLAMNVRNFLKEDAMKTKTHYHAMHADCLQELRRYLESGVVLRRTVPPMVNVTRSEASEGNITVTCRASSFYPRNIILTWRQDGVSLSHDTQQWGDVLPDGNGTYQTWVATRICRGEEQRFTCYMEHSGNHSTHPVPSELVSLQVLDQHPVGTSDHRDATQLGFQPLMSALGSTGSTEGT

SEQ ID NO: 352 - protein, 153 aa, Homo sapiens
EFQEAAKLYHTNYVRNSRAIGVLWAIFTICFAIVNVVCFIQPYWIGDGVDTPQAGYFGLFHYCIGNGFSRELTCRGSFTDFSTLPSGAFKAASFFIGLSMMLIIACIICFTLFFFCNTATVYKICAWMQLTSAACLVLGCMIFPDGWDSDEVN

SEQ ID NO: 353 - protein, 150 aa, Homo sapiens
AWSRRRSWRRRRRRSPRRELMPEKRAGAQAAGSTWLQGFGPPSVYHAAIVIFLEFFAWGLLTTPMLTVLHETFSQHTFLMNGLIQGVKGLLSFLSAPLIGALSDVWGRKPFLLGTVFFTCFPIPLMRISPCLCKYRIRDKRPYNMIFGMN

SEQ ID NO: 354 - protein, 150 aa, Homo sapiens; identical to SEQ ID NO: 353

SEQ ID NO: 355 - protein, 102 aa, Homo sapiens
FAFPHYYIKPYHLKRIHRAVLRGNLEKLKYLLLTYYDANKRDRKERTALHLACATGQPEMVHLLVSRRCELNLCDREDRTPLIKAVQLRQEACATLLLQNGA

SEQ ID NO: 356 - protein, 200 aa, Homo sapiens
PLGVNGLAFLIMVFLIGVCCVPFKEPALQPTEVRNCFGREVAVANRFFFIVFSDAICWIPVFVVKILSLFRVEIPGQSLLSFPSIIHRAFLRPSFDKARVFQRNISLNYHPCMKIPSQELRNPGERLWHLSSRTPSTYGGSRTAPEPGPCLMDQGIRHKSPLISHQGSLPKDSSSKPAHRPRQLFQPESLNRQIVTGFPC

SEQ ID NO: 357 - protein, 118 aa, Homo sapiens
PGPGMQGPPPITPTSWSLPPWRAYVAAAVLCYINLLNYMNWFIIAGVLLDIQEVFQISDNHAGLLQTVFVSCLLLSAPVFGYLGDRHSRKATMSFGILLWSGAGLSSSFISPRYSWLF

SEQ ID NO: 358 - protein, 325 aa, Homo sapiens
KMTSLAQQLQRLALPQSDASLLSRDEVASLLFDPKEAATIDRDTAFAIGCTGLEELLGIDPSFEQFEAPLFSQLAKTLERSVQTKAVNKQLDENISLFLIHLSPYFLLKPAQKCLEWLIHRFHIHLYNQDSLIACVLPYHETRIFVRVIQLLKINNSKHRWFWLLPVKQSGVPLAKGTLITHCYKDLGFMDFICSLVTKSVKVFAEYPGSSAQLRVLLAFYASTIVSALVAAEDVSDNIIAKLFSYIQKGLKSSLPDYRAATYMIICQISVKVTMENTFVNSLASQIIKTLTKIPSLIKDGLSCLIVLLQRQKPESLGKKYVQLN

SEQ ID NO: 359 - protein, 241 aa, Homo sapiens
  misc_feature (1)...(241): Xaa = any amino acid or symbol as shown in the table 8 as set forth in Example 2
VEVPSAVPRPTLDTSRAATCAPGHAVHHPQSLSWPRTAGTVGGSPALRGAHPXPLPTVPADCCEPXEQCPGRRGQQRLCAPSHLLAQLLLWLCTPVPKHWGSAQQPGGQVYHXCLGLPPHPPWQPGXHRGXCVGACGFRDPXCGQGHDSHPTQASGSKAPYPGPAPASGSARTNRASQHLWPRDPAPGGSPHRARPCLQCPPCLLPLPGVLTGWGWVWQKAELFEAWGQEQSRHSSNGVCT

SEQ ID NO: 360 - protein, 1347 aa, Homo sapiens
SSNSQLYRASALFETIRHEAQLSTDYKLSLFDLQTSSYQALQRVLVSLGHHDEALAVAERGRTRAFADLLVERQTGQQDSDPYSPVTIDQILEMVNGQRGLVLYYSLAAGYLYSWLLAPGAGIVKFHEHYLGENTVENSSDFQASSSVTLPTATGSALEQHIASVREALGVESHYSRACASSETESEAGDIMDQQFEEMNNKLNSVTDPTGFLRMVRRNNLFNRSCQSMTSLFSNTVSPTQDGTSSLPRRQSSFAKPPLRALYDLLIAPMEGGLMHSSGPVGRHRQLILVLEGELYLIPFALLKGSSSNEYLYERFGLLAVPSIRSLSVQSKSHLRKNPPTYSSSTSMAAVIGNPKLPSAVMDRWLWGPMPSAEEEAYMVSELLGCQPLVGSVATKERVMSALTQAECVHFATHISWKLSALVLTPSMDGNPASSKSSFGHPYTIPESLRVQDDASDGESISDCPPLQELLLTAADVLDLQLPVKLVVLGSSQESNSKVAADGVIALTRAFLAAGAQCVLVSLWPVPVAAFKMFIHAFYSSLLNGLKASAALGEAMKVVQSSKAFSHPSNWAGFMLIGSDVKLNSPSSLIGQALTEILQHPERARDALRVLLHLVEKSLQRIQNGQRNAMYTSQQSVENKVGGIPGWQALLTAVGFRLDPPTSGLPAAVFFPTSDPGDRLQQCSSTLQSLLGLPNPALQALCKLITASETGEQLISRAVKNMVGMLHQVLVQLQAGEKEQDLASAPIQVSISVQLWRLPGCHEFLAALGFDLCEVGQEEVILKTGKQANRRTVHFALQSLLSLFDSTELPKRLSLDSSSSLESLASAQSVSNALPLGYQQPPFSPTGADSIASDAISVYSLSSIASSMSFVSKPEGGSEGGGPGGRQDHDRSKNAYLQRSTLPRSQLPPQTRPAGNKDEEEYEGFSIISNEPLATYQENRNTCFSPDHKQPQPGTAGGMRVSVSSKGSISTPNSPVKMTLIPSPNSPFQKVGKLASSDTGESDQSSTETDSTVKSQEESNPKLDPQELAQKILEETQSHLIAVERLQRSGGQVSKSNNPEDGVQAPSSTAVFRASETSAFSRPVLSHQKSQPSPVTVKPKPPARSSSLPKVSSGYSSPTTSEMSIKDSPSQHSGRPSPGCDSQTSQLDQPLFKLKYPSSPYSAHISKSPRNMSPSSGHQSPAGSAPSPALSYSSAGSARSSPADAPDIDKLKMAAIDEKVQAVHNLKMFWQSTPQHSTGPMKIFRGAPGTMTSKRDVLSLLNLSPRPNKKEEGVDKLELKELSLQQHDGAPPKAPPNGHWRTETTSLGSLPLPAGPPATAPARPLRLPSGNGYKFLSPGRFFPSSKC

SEQ ID NO: 361 - protein, 266 aa, Homo sapiens
  misc_feature (1)...(266): Xaa = any amino acid or symbol as shown in the table 8 as set forth in Example 2
KRGSVRKLKAPNPXLRDWRMKDRMNTVSVALVLCLNVGVDPPDVVKTTPCARLECWIDPLSMGPQKALGTIGANLQKQYENWQPRARYKQSLDPTVDEVKKLCTSLRRNAKEERVLFHYNGHGVPRPTVNGEVWVFNKNYTQYIPLSIYDLQTWMGSPSIFVYDCSNAGLIVKSFKQFALQREQELEVAAINPNHPLAQMPLPPSMKNCIQLAACEATELLPMIPDLPADLFTSCLTTPIKIALRWFCMQKCVSLVPGVTLDLIEK

SEQ ID NO: 362 - protein, 104 aa, Homo sapiens
IGISCPATIFVPMFSHSLIGIGEEYQLPYYNMVPSDPSYEDMREVVCVKRLRPIVSNRWNSDECLRAVLKLMSECWAHNPASRLTALRIKKTLAKMVESQDVKI

SEQ ID NO: 363 - protein, 104 aa, Homo sapiens; identical to SEQ ID NO: 362

SEQ ID NO: 364 - protein, 158 aa, Homo sapiens
AAGVQMKLEFLQRKFWAATRQCSTVDGPCTQSCEDSDLDCFVIDNNGFILISKRSRETGRFLGEVDGAVLTQLLSMGVFSQVTMYDYQAMCKPSSHHHSAAQPLVSPISAFLTATRWLLQELVLFLLEWSVWGSWYDRGAEAKSCLPSLPQTQEAGPA

SEQ ID NO: 365 - protein, 209 aa, Homo sapiens
EYGTSQVGAYQPFFRGHATMNTKRRVPWLFGEEHTRLIREAIRERYGLLPYWYSLFYHAHVASQPVMRPLWVEFPDELKTFDMEDEYMLGSALLVHPVTEPKATTVDVFLPGSNEVWYDYKTFAHWEGGCTVKIPVALDTIPVFQRGGSVIPIKTTVGKSTGWMTESSYGLRVALSTKGSSVGELYLDDGHSFQYLHQKQFLHRKFSFC

SEQ ID NO: 366 - protein, 712 aa, Homo sapiens
FEQNTKLDQAQQAPEDHYPISLLLPSHMAIGLLMAQEGHCKDSSAMGEEAHHPLTPATPPFPPLSPDWGHMQPDFFVPVAVPAVFRGPPQLQCHGRRLFLNSPCAQKSSSGLVVEPGLSRTLLEMVKLTSMRGQFLEAQIPTGISLTLQYQLYQKQTNKNMSYSFVLFLKWVALGQGRRAGYPSLEDADSRRFNGSRSFLITVIGITLTVEIVTSGMMKGTRVRWSGAGNEGMMGLEEGRNERSVKEAPPRRAVEAQPKDRTWDVGKGQGTEGEGRGLEVEGQQHQGSEPGTIPFSVSWGVLLLAGLCCLVPSSLVEDPQEDAAQKTDTSHHDQGDWEDLACQKISYNVTDLAFDLYKSWLIYHNQHVLVTPTSVAMAFAMLSLGTKADTRTEILEGLNVNLTETPEAKIHECFQQVLQALSRPDTRLQLTTGSSLFVNKSMKLVDTFLEDTKKLYHSEASSINFRDTEEAKEQINNYVEKRTGRKVVDLVKHLKKDTSLALVDYISFHGKWKDKFKAERIMVEGFHVDDKTIIRVPMINHLGRFDIHRDRELSSWVLAQHYVGNATAFFILPDPKKMWQLEEKLTYSHLENIQRAFDIRSINLHFPKLSISGTYKLKRVPRNLGITKIFSNEADLSGVSQEAPLKLSKAVHVAVLTIDEKGTEATGAPHLEEKAWSKYQTVMFNRPFLVIIKEYITNFPLFIGKVVNPTQK

SEQ ID NO: 367 - protein, 281 aa, Homo sapiens
TLRARALQARPRTGSSCTAATWTSSGASQHSLRALSWRRLYLSRAKLKASSRTSALLSGFAMVAMVEVQLESDHEYPPGLLVAFSACTTVLVAVHLFALMVSTCLLPHIEAVSNIHNLNSVHQSPHQRLHRYVELAWGFSTALGTFLFLAEVVLVGWVKFVPIGAPLDTPTPMVPTSRVPGTLAPVATSLSPASNLPRSSASAAPSQAEPACPPRQACGGGGAHGPGWQAAMASTAIMVPVGLVFVAFALHFYRSLVAHKTDRYKQELEELNRLQGELQAV

SEQ ID NO: 368 - protein, 152 aa, Homo sapiens
MIVYWVLMSNFLFNTGKFIFNFIHHINDTDTILSTNNSNPVICPSAGSGGHPDNSSMIFYANDTGAQQFEKWWDKSRTVPFYLVGLLLPLLNFKSPSFFSKFNILGINNQVILPGVTEMPGYCPFLLPVSTECCAVATSYTCFEEKNIGQCC

SEQ ID NO: 369 - protein, 407 aa, Homo sapiens
TTTLDIQRATCCVLLICLFLGANAVWYGAVGDSAYSTGHVSRLSPLSVDTVAVGLVSSVVVYPVYLAILFLFRMSRSKVINTLADHRHRGTDFGGSPWLLIITVFLRSYKFAISLCTSYLCVSFLKTIFPSQNGHDGSTDVQQRARRSNRRRQEGIKIVLEDIFTLWRQVETKVRAKIRKMKVTTKVNRHDKINGKRKTAKEHLRKLSMKEREHGEKERQVSEAEENGKLDMKEIHTYMEMFQRAQALRRRAEDYYRCKITPSARKPLCNRVRMAAVEHRHSSGLPYWPYLTAETLKNRMGHQPPPPTQQHSIIDNSLSLKTPSECLLTPLPPSALPSADDNLKTPAECLLYPLPPSADDNLKTPPECLLTPLPPSAPPSADDNLKTPPECVCSLPFHPQRMIISRN

SEQ ID NO: 370 - protein, 273 aa, Homo sapiens
  misc_feature (1)...(273): Xaa = any amino acid or symbol as shown in the table 8 as set forth in Example 2
NPNPSIGDIKDIKKAAKSMLDPAHKSHFHPVTPSLVFLCFIFDGLHQALLSVGVSKRSNTVVGNENEERGTPYASRFKDMPNFIALEKSSVLRHCCDLLIGVAAGSSDKICTSSLQVQRRFKAMMASIGRLSHGESADLLISCNAESAIGWISSRPWVGELMFTFLFGDFESPLHKLRKSSXLPRKHRXQPINAVRMFLDQCMDGSIALRAIVSEIPVFEEKKNNGXKGIGEIFXVWGCTLPPHYWGAVTTNVPKLSNSGKLLGQDEQPHIFG

SEQ ID NO: 371 - protein, 220 aa, Homo sapiens
MMMVMMVVMVVVVVVVELRAIKMQMEDRWSNRPDTATALAGGAVMPELILYVAITLSVAERLVGPAPHPLKMFACSKFVSTPSLVKSTSQLLSRPLSAVVLKRPEILTDESLSKLGSLMSPLTSTCLLNRKLPKPAPISKGTSNNSSPKFNWKLGLATSWGGWFLGLGLETVFGEPSSLGYARNPSLKQQLFSYAILGFALSEAMGLFCLMVAFLILFAM

SEQ ID NO: 372 - protein, 1013 aa, Homo sapiens
  misc_feature (1)...(1013): Xaa = any amino acid or symbol as shown in the table 8 as set forth in Example 2
FRAALAIFARACFLLSSLASLPVFLPVFPARPPPSSPAGPLPGGIIWSPAMDAPKAGYAFEYLIETLNDSSHKKFFDVSKLGTKYDVLPYSIRVLLEAAVRNCDGFLMKKEDVMNILDWKTKQSNVEVPFFPARVLLQDFTGIPAMVDFAAMREAVKTLGGDPEKVHPACPTDLTVDHSLQIDFSKCAIQNAPNPGGGDLQKAGKLSPLKVQPKKLPCRGQTTCRGSCDSGELGRNSGTFSSQIENTPILCPFHLQPVPEPETVLKNQEVEFGRNRERLQFFKWSSRVFKNVAGIPPGTGMAHQINLEYLSRVVFEEKDLLFPDSVVGTDSHITMVNGLGILGWGVGGIETEAVMLGLPVSLTLPEVVGCELTGSSNPFVTSIDVVLGITKHLRQVGVAGKFVEFFGSGVSQLSIVDRTTIANMCPEYGAILSFFPVDNVTLKHLEHTGFSKAKLESMETYLKAVKLFRNDQNSSGEPEYSQVIQINLNSIVPSVSGPKRPQDRVAVTDMKSDFQACLNEKVGFKGFQIAAEKQKDIVSIHYEGSEYKLSHGSVVIAAVISCTNNCNPSVMLAAGLLAKKAVEAGLRVKPYIRTSLSPGSGMVTHYLSSSGVLPYLSKLGFEIVGYGCSTXVGNTAPLSDAVLNAVKQGDLVTCGILSGNKNFEGRLCDCVRANYLASPPLVVAYAIAGTVNIDCQTEPLGTDPTGKNIYLHDIWPSREEVHRVEEEHVILSMFKALKDKIEMGNKRWNSLEAPDSVLFPWDLKSTYIRCPSFFDKLTKEPIALQAIENAHVLLYLGDSVTTDHISPAKSIARNSAAAKYLTNRGLTPREFNSYGARRGNDAVMTRGTFANIKLFNKFIGKPAPKTIHFPSGQTLDVFEAAELYQKEGIPLIILAGKKYGSGNSRDWAAKGPYLLGVKAVLAESYEKIHKDHLIGIGIAPLQFLPGENADSLGLSGRETFSLTFPEELSPGITLNIQTSTGKVFSVIASFEDDVEITLYKHGGLLNFVARKFS

SEQ ID NO: 373 - protein, 172 aa, Homo sapiens
  misc_feature (1)...(172): Xaa = any amino acid or symbol as shown in the table 8 as set forth in Example 2
XTSKSWLHGSIFGDINSSPSEDNWLKGTRRLDTDHCNGNADDLDCSSLTDDWESGKMNAESVITSSSSHIISQPPGGNSHSLSLQSQLTASERFQENSSDHSETRLLQEVFFQAILLAVCLIISACARWFMGEILASVFTCSLMITVAYVKSLFLSLASYFKTTACARFVKI

SEQ ID NO: 374 - protein, 172 aa, Homo sapiens; identical to SEQ ID NO: 373
  misc_feature (1)...(172): Xaa = any amino acid or symbol as shown in the table 8 as set forth in Example 2

SEQ ID NO: 375 - protein, 172 aa, Homo sapiens; identical to SEQ ID NO: 373
  misc_feature (1)...(172): Xaa = any amino acid or symbol as shown in the table 8 as set forth in Example 2

SEQ ID NO: 376 - protein, 320 aa, Homo sapiens
SRSCVCSQESFGGCCVSGLIAMGTKAQVERKLLCLFILAILLCSLALGSVTVHSSEPEVRIPENNPVKLSCAYSGFSSPRVEWKFDQGDTTRLVCYNNKITASYEDRVTFLPTGITFKSVTREDTGTYTCMVSEEGGNSYGEVKVKLIVLVPPSKPTVNIPSSATIGNRAVLTCSEQDGSPPSEYTWFKDGIVMPTNPKSTRAFSNSSYVLNPTTGELVFDPLSASDTGEYSCEARNGYGTPMTSNAVRMEAVERNVGVIVAAVLVTLILLGILVFGIWFAYSRGHFDRTKKGTSSKKVIYSQPSARSEGEFKQTSSFLV

SEQ ID NO: 377 - protein, 132 aa, Homo sapiens
  misc_feature (1)...(132): Xaa = any amino acid or symbol as shown in the table 8 as set forth in Example 2
HPIVGLRRMGDFKACQFQEGEGRSVGGVSRSPXWPSLRASPLSPTSSDSIPSGHPAPPTPPQPPTQPLSEANSQSEGSLSLERRFPVTXPWGTSLPFLSPPTPSAVLLARTLAYTKDGGCGCGAELVLTPIK

SEQ ID NO: 378 - protein, 110 aa, Homo sapiens
MIIYRDLISHDEMFSDIYKIREIADGLCLEVEGKMVSRTEGNIDDSLIGGNASAEGPEGEGTESTVITGVDIVMNHHLQETSFTKEAYKKYIKDYMKSIKGKLEEQRPDR

SEQ ID NO: 379 - protein, 113 aa, Homo sapiens
  misc_feature (1)...(113): Xaa = any amino acid or symbol as shown in the table 8 as set forth in Example 2
MRHPHRLQPGCRGMVPVPADPVPVQSAEDLSLFLSTRCVVVLLSAELVQHFHKPALLPLLQRAFHPPHRVVRLLCGVRDSEEFLDFFPDWAHWQELTCDDTYVAAVKKAISEX

SEQ ID NO: 380 - protein, 176 aa, Homo sapiens
TTTMSSKKAKTKTTKKRPQRATSNVFAMFDQSQIQEFKEAFNMIDQNRDGFIDKEDLHDMLASLGKNPTDAYLDAMMNEAPGPINFTMFLTMFGEKLNGTDPEDVIRNAFASCFDEEATGTIQEDYLRELLTTMGDRFTDEEVDELYREAPIDKKGNFNYIEFTRILKHGAKDKDD

SEQ ID NO: 381 - protein, 113 aa, Homo sapiens
PEETPLPTLPERGSLRTGWRRWGPSRAPGALPGMSRPTHPKAGAAAPCCPSPGLGNDDPPKSPSAPQTQGLRPPAPGIRESIPAQHPQHPRVWPPCTSLSHPRRSVPLAPQCP

SEQ ID NO: 382 - protein, 78 aa, Homo sapiens
MMYRTHCQRILDTVIRANFDEVQSFLLHFWQGMPPHMLPVLGSSTVVNIVGVCDSILYKAISGVLMPTVLQALPDSLT

SEQ ID NO: 383 - protein, 350 aa, Homo sapiens
MPGTCKCTGAEASRIWKGEDVCEYWGQRVVAFLAMVMGTHTYSHWPSCCPSKGQDTSEELLRWSTVPVPPLEPARPNRHPESCRASEDGPLNSRAISPWRYEPDKCRPHRLDRDLNRLPQDLYHARCLCPHCVSLQTGSHMDPRGNSELLYHNQTVFYRRPCHGEKGTHKGYCLERRLYRVSLACGAVLVGPTKMLSARDRRDRHPEEGVVAELQGFAVDKAFLTSHKGILLETELALTLIIFICFTASISAYMAAALLEFFITLAFLFLYATQYYQRFDRINWPWLDFLRCVSAIIIFLVVSFAAVTSRDGAAIAAFVFGIILVSIFAYDAFKIYRTEMAPGASQGDQQ

SEQ ID NO: 384 - protein, 127 aa, Homo sapiens
SRYSRVDDFVAEPSSAAERLCRHGYTMERPDKAALNALQPPEFRNESSLASTLKTLLFFTALMITVPIGLYFTTKSYIFEGALGMSNRDSYFYAAIVAVVAVHVVLALFVYVAWNEGSRQWREGKQD

SEQ ID NO: 385 - protein, 88 aa, Homo sapiens
KADVKNLSGKNRPVNSKIHDIFKGWALQPLDPDGRVKIWVYGVSGGAFLIMIFLIFTSYLVCKKPKPHQSTPPQQKPLTLSYDGDLDM

SEQ ID NO: 386 - protein, 175 aa, Homo sapiens
PCVYSQFPAGEQCLKLHSPAEASPPALEASEAQTRKAPECGSGVPEVAGGSCPCLLLCLPRHQAVPTQGPGTYSPCTSHQPHIFPRPAAPHHLGLLQNPHNAASCIQCLYPAGVATTMPRRKAEGDAEGDKAKVKDEPQRRPAKLSAKPAPPNPEAKPKNAPGVTLSLRGTATRF

SEQ ID NO: 387 - protein, 272 aa, Homo sapiens
IILLILTEDDGFNRSIHEVILKNITWYSERVLTEISLGSLLILVVIRTIQYNMTRTRDKYLDTNCLAALANMSAQFRSLHQYAAQRIISLFSLLSKKHNKVLEQATQSLRGSLSSNDVPLPDYAQDLNVIEEVIRMMLEIINSCLTNSLHHNPNLVYALLYKRDLFEQFRTHPSFQDIMQNIDLVISFFSSRLLQAGAELSVERVLEIIKQGVVALPKDRLKKFPELKFKYVEEEQPEEFFIPYVWSLVYNSASRPCTGIHRTSSCSPWIPD

SEQ ID NO: 388 - protein, 100 aa, Homo sapiens
NLPGWTVLFLSVLGLLASRAVSALSSLFAAEVFPTVIRGAGLGLVLGAGFLGQAAGPLDTLHGRQGFFLQQVVFASLAVLALLCVLLLPESRSRGLPQSL

SEQ ID NO: 389 - protein, 223 aa, Homo sapiens
TCTYKYLMGWIRGRRSRHSWEMSEFHNYNLDLKKSDFSTRWQKQRCPVVKSKCRENASPFFFCCFIAVAMGIRFIIMVAIWSAVFLNSLFNQEVQIPLTESYCGPCPKNWICYKNNCYQFFDESKNWYESQASCMSQNASLLKVYSKEDQDLLKLVKSYHWMGLVHIPTNGSWQWEDGSILSPNLLTIIEMQKGDCALYASSFKGYIENCSTPNTYICMQRTV

SEQ ID NO: 390 - protein, 117 aa, Homo sapiens
VGERLTLPGLVSADNGTYTCEASNKHGHARALYVLVVYDPGAVVEAQTSVPYAIVGGILALLVFLIICVLVGMVWCSVRQKGSYLTHEASGLDEQGEAREAFLNGSDGHKRKEEFFI

SEQ ID NO: 391 - protein, 174 aa, Homo sapiens
CCCNVFNCFSLSLQTWALHSLSLIIDSAGPLYYVHVEPTLSLIIIVVVNVPPTHAEVHQSLGRCLNALITTLGPELQGNSTSISTLRTSCLLGCAVMQDNPDCLVQAQAISCLQQLHMFAPRHVNLSSLVSCLCVNLCSPYLLLRRAVLACLRQLVQREAAEVSEHAVMLAKDS

SEQ ID NO: 392 - protein, 212 aa, Homo sapiens
EMSERWKRRGNSTRTSSLASGAGDPEPDLWIIQPQELVLGTTGDTVFLNCTVLGDGPPGPIRWFQGAGLSREAIYNFGGISHPKATAVQASNNDFSILLQNVSSEDAGTYYCVKFQRKPNRQYLSGQGTSLKVKAKSTSSKEAEFTSEPATEMSPTGLLVVFAPVVLGLKAITLAALLLALATSRRSPGQEDVKTTGPAGAMNTLSWSKGQE

SEQ ID NO: 393 - protein, 185 aa, Homo sapiens
APLESLKPPPNVPPSYELRVVIWNTEDVVLDDENPLTGEMSSDIYVKSWVKGLEHDKQETDVHFNSLTGEGNFNWRFVFRFDYLPTEREVSVWRRSGPFALEEAEFRQPAVLVLQVWDYDRISANDFLGSLELQLPDMVRGARGPELCSVQLARNGAGPRCNLFRCRRLRGWWPVVKLKEAEDVE

SEQ ID NO: 394 - protein, 261 aa, Homo sapiens
GPRARPPVLTRRSSWPPRRSRGSMRFKNRFQRFMNHRAPANGRYKPTCYEHAANCYTHAFLIVPAIVGSALLHRLSDDCWEKITAWIYGMGLCALFIVSTVFHIVSWKKSHLRTVEHCFHMCDRMVIYFFIAASYAPWLNLRELGPLASHMRWFIWLMAAGGTIYVFLYHEKYKGVELFFYLTMGFSPALVVTSMNNTDGLQELACGGLIYCLGVVFFKSDGIIPFAHAIWHLFVATAAAVHYYAIWKYLYRSPTDFMRHL

SEQ ID NO: 395 - protein, 79 aa, Homo sapiens
KTQETHIYISEHIFFPFLQGFGNLPICMAKTDLSLSHQPDKKGVPSDFILPISDVRASIGAGFIYPLVGTGSRESPLWL

SEQ ID NO: 396 - protein, 691 aa, Homo sapiens
MKPCAHSWNAELSRNIIRHSFNLVMVAASQVAVSQLLGSYEILLLVSIELMFCFGLGYFFIPMQEWPNTYGERVFVDVESSVFKWNHKCLHKTEAERDYTKKRLKLCGHKPGNAVGQQKLEEARNRFFTRAPGGSAALPTLRFQPSDTDFRLLASRTILTFETKNPSELAERLRSVCGNQSNAYARLLEYRLNALRGLWNAQRQLALEEQHERESSGDEETLALLKRQGLLQQPEQAPFTSRMGLLLVFPLIQSQSRTDPSLCNITAEVLLNCLRDCQPLSLTKEPADCLNGIETLLCSWLEETSDTGRHIPHKQKENAAAALVALACARGFVYCRNEELEPGWVAFGSGSLLHRPVSFDNKPHSLFQVIDQNTLQVCQVVPMPANHLPIGSTMSTVHLSSDGTYFYWIWSPASLNEKTPKGHSVFMDIFELVTLKGKKAKGKKVAPAPAVVKKQEAKKVVNSLFEKRDIQPKRELTYFVKWPRYVRLQQQRAILYKQLKVPPAINQFTQALNCQTVTQLLKLAHKYRPETKQEKKQRLLAQAEKKAAGKGGVPTKRPPALRAGVNTITTLVENKKAQLVVIAHDVDSIELVVFLPALCCKMGVPYCIIKGKARLGRLVHRKTCTTVAFTQVNLEDKGALAKLVEGIRTNDNDRYDEICCHWGGNILGPKSVACIAKLEKAKAKELATKLG

SEQ ID NO: 397 - protein, 535 aa, Homo sapiens
SELLLTFSFRLRMTQNKLKLCSKANVYTEVPDGGWGWAVAVSFFFVEVFTYGIIKTFGVFFNDLMDSFNESNSRISWIISICVFVLTFSAPLATVLSNRFGHRLVVMLGGLLVSTGMVAASFSQEVSHMYVAIGIISGLGYCFSFLPTVTILSQYFGKRRSIVTAVASTGECFAVFAFAPAIMALKERIGWRYSLLFVGLLQLNIVIFGALLRPIFIRGPASPKIVIQENRKEAQYMLENEKTRTSIDSIDSGVELTTSPKNVPTHTNLELEPKADMQQVLVKTSPRPSEKKAPLLDFSILKEKSFICYALFGLFATLGFFAPSLYIIPLGISLGIDQDRAAFLLSTMAIAEVFGRIGAGFVLNREPIRKIYIELICVILLTVSLFAFTFATEFWGLMSCSIFFGFMVGTIGGLTFHCLLRMMSWALQKMSSAAGVYIFIQSIAGLAGPPLAGLLVDQSKIYSRAFYSCAAGMALAAVCLALVRPCKMGLCQHHHSGETKVVSHRGKTLQDIPEDFLEMDLAKNEHRVHVQMEPV

SEQ ID NO: 398 - protein, 173 aa, Homo sapiens
PPRAAELAPSPPADMFESKNGPEYASFFPVMGASAAMVFSALGPAYGTTKSGTGISAMSVIRPEQIMKSIIPVVMAGIIAISGLVVAVLIANSLECSVYADDLEMSFLFPRMFIYKDLACSCVSGTALVSQLFITLVRGSPCGFLLFRLPGWNRPPRRARGPARNCVPQSFWM

SEQ ID NO: 399 - protein, 148 aa, Homo sapiens
HASGFVVQGSNGEFPFLTSSERLEVVSRVRQAMPMNRLLLAGSGCESTQATVEMTVSMAQVGADAAMVVTPCYYRGRMSSAALIHHYTKVADLSPIPVVLYSVPANTGLDLPVDAVVTLSQHPNIVGMKDSGGDVTRIGLIVHKTQEA

SEQ ID NO: 400 - protein, 201 aa, Homo sapiens
MPIGLRGLMIAVMLAALMSSLTSIFNSSSTLFTMDIWRRLRPRSGERELLLVGRLVIVALIGVSVAWIPVLQDSNSGQLFIYMQSVTSSLAPPVTAVFVLGVFWRRANEQGAFWGLIAGLVVGATRLVLEFLNPAPPCGEPDTRPAVLGSIHYLHFAVALFALSGAVVVAGSLLTPPPQSVQIENLTWWTLAQDVPLGTKA

SEQ ID NO: 401 - protein, 375 aa, Homo sapiens
YNRAMFHPHAVNKIALSLNNKNPRSKVLFLELLAAVCLVRGGHKLFYLAFDNFKEVCGEKQRFEKLMEHFRNEDNNIDFMVASMQFINIVVHSVEDMNFRVHLQYEFTKLGLDEYLDKLKHTESDKLQVQIQAYLDNVFDVGALLEDAETKNAALERVEELEENISHLSEKLQDTENEAMSKIVELEKQLMQRNKELDVVREIYKDANTQVHTLRKMVKEKEEAIQRQSTLEKKIHELEKQGTIKIQKKGDGDIAILPVVASGTLSMGSEVVAGNSVGPTMGAASSGPLPPPPPPLPPSSDTPETVQNGPVTPPMPPPPTPPPPPPPPPPPPPPPPLPGPAAETVPAPPLAPPLPSAPPLPGTSSPTVVFNSGLA

SEQ ID NO: 402 - protein, 317 aa, Homo sapiens
NSAKKNVSSPTSSNKEVVMRNDQNNGDMKPFQNFTTIPITQALNYNLSKEGHLEKEPWNAFSHHGPVNVSINGIPCILFWAKRIMIKFKNQTWLDLTDEPFGQKVTVDPDNSNCSEESARLSLKLGDAGNPRSLAIRFILTNYNKLSIQSWFSLRRVEIISNNSIQAVFNPTGVYAPSGYSYRCQRVGSLQQDQALLLPSDTDDGSSLWEVTFIDFQIQGFAIKGGRFTKAQDCASSFSPAFLIGLAMSLILLLVLAYALHMLIYLRYLDQQYDLIASPAHFSQLKARDTAEEKELLRSQGAECYKLRSQQISKIYV

SEQ ID NO: 403 - protein, 334 aa, Homo sapiens
RRGIRDSGIEYLLDQTDVLVVGVLGLQGTGKSMVMSLLSANTPEEDQRTYVFRAQSAEMKERGGNQTSGIDFFITQERIVFLDTQPILSPSILDHLINNDRKLPPEYNLPHTYVEMQSLQIAAFLFTVCHVVIVVQDWFTDLSLYRFLQTAEMVKPSTPSPSHESSSSSGSDEGTEYYPHLVFLQNKARREDFCPRKLRQMHLMIDQLMAHSHLRYKGTLSMLQCNVFPGLPPDFLDSEVNLFLVPFMDSEAESENPPRAGPGSSPLFSLLPGYRGHPSFQSLVSKLRSQVMSMARPQLSHTILTEKNWFHYAARIWDGVRKSSALAEYSRLLA

SEQ ID NO: 404 - protein, 314 aa, Homo sapiens
  misc_feature (1)...(314): Xaa = any amino acid or symbol as shown in the table 8 as set forth in Example 2
IKIRSLGCLIAAMILLSSLTAHPILRLIITMEISFFSFFILLYSFAIHRYIPFILWPIPDLFNDLIACAFLVGAVVFAVRSRRSMNLHYLLAVILIGAAGVFAFIDVCLQRNHFRGKKAKKHMLVPPPGKEKGPQQGKGPEPAKPPEPGKPPGPAKGKKXLGCLIAAMILLSSLTAHPILRLIITMEISFFSFFILLYSFAIHRYIPFILWPIPDLFNDLIACAFLVGAVVFAVRSRRSMNLHYLLAVILIGAAGVFAFIDVCLQRNHFRGKKAKKHMLVPPPGKEKGPQQGKGPEPAKPPEPGKPPGPAKGKK

SEQ ID NO: 405 - protein, 509 aa, Homo sapiens
MAITLRELNGLSYEEIAAIMDCPALTIAGYWIRVLGMQKEQLSALMDGETLDSELLNELAHNPEMQKTWESYHLIRDSMRGDTPEVLHFDISSRVMAAIEEEPVFLRDIICEYNCASIPYERDRIMQSVTKIVNAQLIRIELAGKHTIDVLMERLSVRIALIKKLLRLFFPLSLRVRFLLATAAVVLVLSLAYGMVALIGYSVSFDKTTFRLLRGESNLFYTLAKWENNKLHVELPENIDKQSPTMTLIYDENGQLLWAQRDMKGWTNECILVLSGDHSIQQQLQEVREDDDDAEMTHSVAVNVYPATSRMPKLTIVVVDTIPVELKSSYMGLCGQPTNKDVLRRMKKRYPTTFVMVVMLASYFLISMFGGVMVFVFGITFPLLCMEKIVSTKAILDKNTNQCKGMCKGIRTLKSCLCYLINGSSIVEVQDSWLMGAIKFQQESRLLHHRLLSAIRIKQKEEEERNKKEKKDKELESIFPSYGPFHYFKSKTIKEWAPFYGYDFYPLVL

SEQ ID NO: 406 - protein, 382 aa, Homo sapiens
TRYDPRVRRDRCGTSDPYVKFKLNGKTLYKSKVIYKNLNPVWDEIVVLPIQSLDQKLRVKVYDRDLTTSDFMGSAFVILSDLELNRTTEHILKLEDPNSLEDDMGVIVLNLNLVVKQGDFKRHRWSNRKRLSASKSSLIRNLRLSESLKKNQLWNGIISITLLEGKNVSGGSMTEMFVQLKLGDQRYKSKTLCKSANPQWQEQFDFHYFSDRMGILDIEVWGKDNKKHEERLGTCKVDISALPLKQANCLELPLDSCLGALLMLVTLTPCAGVSVSDLCVCPLADLSERKQITQRYCLQNSLKDVKDVGILQVKVLKAADLLAADFSGKSDPFCLLELGNDRLQTHTVYKNLNPEWNKVFTFPIKDIHDVLEVTVFDEDGDK

SEQ ID NO: 407 - protein, 199 aa, Homo sapiens
  misc_feature (1)...(199): Xaa = any amino acid or symbol as shown in the table 8 as set forth in Example 2
LPSLSLRLLHNCAPLVLDKTISFIICIITRPSIMTEIRXYTLHGVNARNQNSRLAATKPSSVRSGLFQLSSSSARQPTPQRPAPRAARLPRPPPGPRPPPPATPRPPPPQLPALPPPAAAALRGMPGAVAATAAPAPRRQEPGIPPRRAPEAPGSPSSAVLPGRDGAGRARGRAWVWVPPRAGRRWRQVPERGAHRGAQ

SEQ ID NO: 408 - protein, 199 aa, Homo sapiens; identical to SEQ ID NO: 407
  misc_feature (1)...(199): Xaa = any amino acid or symbol as shown in the table 8 as set forth in Example 2

SEQ ID NO: 409 - protein, 125 aa, Homo sapiens
EVSLSTVPASGHHSGPSLHAENHTSQTFTQHFLPQSQKMHKEEHEVAVLGAPPSTILPRSTVINIHSETSVPDHVVWSLFNTLFLNWCCLGFIAFAYSVKSMDRKMVGDVTGAQAYASTAKCLNI

SEQ ID NO: 410 - protein, 264 aa, Homo sapiens
RIVFEQDHAKLGTRAGTRRDSDMAGHTQQPSGRGNPRPAPSPSPVPGTVPGASERVALKKEIGLLSACTIIIGNIIGSGIFISPKGVLEHSGSVGLALFVWVLGGGVTALGSLCYAELGVAIPKSGGDYAYVTEIFGGLAGFLLLWSAVLIMYPTSLAVISMTFSNYVLQPVFPNCIPPTTASRVLSMACLMLLTWVNSSSVRWATRIQDMFTGGKLLALSLIIGVGLLQIFQGHFEELRPSNAFAFWMTPSVGHLALAFLQGS

SEQ ID NO: 411 - protein, 228 aa, Homo sapiens
SMDVKERRPYCSLTKSRREKERRYTNSSADNEECRVPTQKSYSSSETLKAFDHDSSRLLYGNRVKDLVHREADEFTRQGQNFTLRQLGVCEPATRRGLAFCAEMGLPHRGYSISAGSDADTENEAVMSPEHAMRLWGRGVKSGRSSCLSSRSNSALTLTDTEHENKSDSENGKFSFWLYNVGIQCFCLFWLTPRGGDVFLSLFPLILLSLSFLSISFCFNVVELKKCP

SEQ ID NO: 412 - protein, 242 aa, Homo sapiens
SPSGLQLPQYSAAELQSPAAPGLRHVDSAGWGRRRAGPAGSSGYRAGYSSSTPHDANMAAQKDQQKDAEAEGLSGTTLLPKLIPSGAGREWLERRRATIRPWSTFVDQQRFSRPRNLGELCQRLVRNVEYYQSNYVFVFLGLILYCVVTSPMLLVALAVFFGACYILYLRTLESKLVLFGREVSPAHQYALAGGISFPFFWLAGAGSAVFWVLGATLVVIGSHAAFHQIEAVDGEELQMEPV
